(19) United States
(12) Patent Application Publication
(10) Pub. No.: US 2023/0183790 A1
(43) Pub. Date: Jun. 15, 2023

(54) RECOMBINANT REVERSE TRANSCRIPTASE VARIANTS

(71) Applicant: Codexis, Inc., Redwood City, CA (US)

(72) Inventors: Ericka Bermudez, Aptos, CA (US); David Elgart, San Mateo, CA (US); Mathew G. Miller, San Carlos, CA (US); Jovana Nazor, Milpitas, CA (US); Zhe Rui, Newark, CA (US); Nandhitha Subramanian, Cambridge (GB)

(21) Appl. No.: 18/046,893

(22) Filed: Oct. 14, 2022

Related U.S. Application Data
(60) Provisional application No. 63/256,489, filed on Oct. 15, 2021.

(51) Int. Cl. C12Q 1/6848; C12N 9/12; C12Q 1/6851

(52) U.S. Cl. CPC C12Q 1/6848; C12N 9/1276; C12Y 207/07049; C12Q 1/6851

(57) ABSTRACT

The present disclosure relates to recombinant reverse transcriptase polypeptides and compositions thereof, as well as polynucleotides encoding the recombinant reverse transcriptase polypeptides. The disclosure also provides methods for using the recombinant reverse transcriptase polypeptides and compositions thereof for diagnostic and as molecular biological tools.

### CROSS-REFERENCE TO RELATED APPLICATIONS

[0001] This application claims the benefit under 35 U.S.C. § 119(e) of U.S. Provisional Application No. 63/256,489, filed Oct. 15, 2021, which is incorporated by reference herein in its entirety.

### REFERENCE TO SEQUENCE LISTING, TABLE OR COMPUTER PROGRAM

[0002] The Sequence Listing concurrently submitted herewith via EFS-Web as file name CX9-213US1_ST26.xml, created on Oct. 14, 2022 and having a file size of 1.47 Mbytes, is incorporated by reference herein.

### TECHNICAL FIELD

[0003] The present disclosure provides recombinant reverse transcriptase polypeptides and compositions thereof, polynucleotides encoding the recombinant reverse transcriptase polypeptides, and methods for use of the recombinant reverse transcriptase polypeptides and compositions thereof for diagnostic, molecular biological tools, and other purposes.

### BACKGROUND

[0004] Reverse transcriptase (RT), also referred to as an RNA-directed DNA polymerase, catalyzes the synthesis of a DNA copy of an RNA target template. RT enzymes were initially identified from RNA tumor viruses, such as murine leukemia virus and Rous sarcoma virus, in their role in the replication of such viruses. Because of RT's ability to synthesize DNA copies from an RNA template, RTs have become essential tools in diagnostics and research.

[0005] For example, RTs are used with polymerase chain reaction, a technique called RT-PCR, for detection of RNA molecules, including for detecting gene expression and RNA of pathogens such as HIV and Covid-19. A variation of RT-PCR is quantitative RT-qPCR which is a quantitative analysis of RNA levels where levels of amplified cDNA are measured in real time during the exponential phase of amplification. The amplification level is used as a basis to quantitate the original targets within the RNA population. As a molecular biological tool, applications of RTs include generation of cDNA from mRNA, such as for generating cDNA libraries; rapid amplification of cDNA ends (RACE) for determining sequences at the 5′ and 3′ ends of cDNAs; and sequencing of RNA.

[0006] Reverse transcriptases used as tools in biotechnology and diagnostics include RTs of avian myeloblastosis virus (AMV) and moloney murine leukemia virus (M-MLV). A variant M-MLV reverse transcriptase having a point mutation resulting in reduction of RNase H activity displays enhanced thermostability compared to the wild-type enzyme. Robust RNAseH activity is an advantage in RT-PCR, whereas lower RNAseH activity is beneficial for cDNA cloning, particularly when long mRNA transcripts are reverse transcribed. Other known reverse transcriptases include RTs of human immunodeficiency virus-1 (HIV-1) and telomerase reverse transcriptase.

### SUMMARY

[0007] The present disclosure provides recombinant reverse transcriptase polypeptides and compositions thereof, polynucleotides encoding the recombinant reverse transcriptase polypeptides, and methods for use of the recombinant reverse transcriptase and compositions thereof for molecular biological tools, diagnostic, and other purposes.

[0008] In one aspect, the present disclosure provides a recombinant reverse transcriptase, or a functional fragment thereof, comprising a polypeptide sequence having at least 75%, 80%, 81%, 82%, 83%, 84%, 85%, 86%, 87%, 88%, 89%, 90%, 91%, 92%, 93%, 94%, 95%, 96%, 97%, 98%, 99%, or more sequence identity to a reference sequence corresponding to residues 12 to 687 of SEQ ID NO: 2, 24, 94, or 352, or to a reference sequence corresponding to SEQ ID NO: 2, 24, 94, or 352, wherein the polypeptide sequence comprises one or more substitutions relative to the reference sequence corresponding to residues 12 to 687 of SEQ ID NO: 2, 24, 94, or 352, or to the reference sequence corresponding to SEQ ID NO: 2, 24, 94, or 352.

[0009] In some embodiments, the recombinant reverse transcriptases, or a functional fragment thereof, comprises a polypeptide sequence having at least 75%, 80%, 81%, 82%, 83%, 84%, 85%, 86%, 87%, 88%, 89%, 90%, 91%, 92%, 93%, 94%, 95%, 96%, 97%, 98%, 99%, or more sequence identity to the reference sequence corresponding to residues 12 to 687 of SEQ ID NO: 2, or to the reference sequence corresponding to SEQ ID NO: 2, wherein the polypeptide sequence comprises one or more substitutions relative to the reference sequence corresponding to residues 12 to 687 of SEQ ID NO: 2, or to the reference sequence corresponding to SEQ ID NO: 2.

[0010] In some embodiments, the recombinant reverse transcriptases, or a functional fragment thereof, comprises a polypeptide sequence having at least 75%, 80%, 81%, 82%, 83%, 84%, 85%, 86%, 87%, 88%, 89%, 90%, 91%, 92%, 93%, 94%, 95%, 96%, 97%, 98%, 99%, or more sequence identity to the reference sequence corresponding to residues 12 to 687 of SEQ ID NO: 24, 94, or 352, or to the reference sequence corresponding to SEQ ID NO: 24, 94, or 352, wherein the polypeptide sequence comprises one or more substitutions relative to the reference sequence corresponding to residues 12 to 687 of SEQ ID NO: 2, or to the reference sequence corresponding to SEQ ID NO: 2.

[0011] In some embodiments, the polypeptide sequence of the recombinant reverse transcriptase comprises at least a substitution at amino acid position 18, 25, 49, 63, 68, 69, 72, 74, 78, 81, 83, 84, 85, 89, 90, 92, 94, 98, 102, 113, 114, 118, 119, 129, 130, 132, 134, 163, 167, 171, 173, 178, 196, 199, 205, 209, 210, 212, 216, 242, 258, 260, 261, 266, 294, 297, 298, 300, 303, 305, 307, 308, 309, 310, 311, 314, 317, 319, 321, 329, 331, 333, 338, 342, 343, 349, 356, 370, 403, 444, 447, 454, 464, 465, 466, 474, 479, 508, 509, 519, 536, 537, 554, 574, 576, 583, 595, 598, 606, 638, 639, or 662, or combinations thereof, wherein the amino acid positions are relative to the reference sequence of SEQ ID NO: 2.

[0012] In some embodiments, the polypeptide sequence of the recombinant reverse transcriptase comprises at least a substitution 18E, 25E, 49G, 63L/P, 68S, 69R, 72M, 74K/M/P, 78V, 81K, 83E/A/C/R/W, 84N, 85R, 89A/M, 90I, 92T, 94L, 98S, 102C, 113G/T, 114G/K, 118R, 119Y, 129L, 130R/S, 132F, 134F/P, 163P, 167Y, 171L, 173A, 178L, 196C/H, 199L, 205M, 209A, 210L, 212K/N/V, 216R, 242A, 258T, 260G, 261N, 266V, 294Q, 297W, 298E/R, 3001, 303G/Q, 305P/S, 307K/N, 308G, 309E/P/T, 310R, 311A/I/P, 314A/K/M, 317C, 319C/G/S, 321A, 329S, 331E, 333V, 338V, 342W, 343A/V, 349G, 356P, 370G, 403H, 444L, 447G/L/R, 454A, 464L, 465S, 466K, 474A, 479D, 508L, 509E, 519P, 536E/A/N, 537W, 554T, 574D/Q, 576I, 583K, 595N, 598S, 606K/Q, 638H, 639H, or 662R, or combinations thereof, wherein the amino acid positions are relative to the reference sequence of SEQ ID NO:2

[0013] In some embodiments, the polypeptide sequence of the recombinant reverse transcriptase comprises at least a substitution at amino acid position 49, 266, 298, 307, 444, 509, or 536, or combinations thereof, wherein the amino acid positions are relative to the reference sequence of SEQ ID NO: 2. In some embodiments, the polypeptide sequence of the recombinant reverse transcriptase comprises at least a substitution 49G, 266V, 298E/R, 307K/N, 444L, 509E, or 536E/A/N, or combinations thereof, wherein the amino acid positions are relative to the reference sequence of SEQ ID NO: 2.

[0014] In some embodiments, the polypeptide sequence of the recombinant reverse transcriptase comprises at least a substitution or substitution set at amino acid position 114/210/307, 114/309, 49, 63/68/216/258/261, 63/68/216/261, 63/209/314/665, 447/665, 331, 90/307/349, 114/173/331, or 266, wherein the amino acid positions are relative to the reference sequence of SEQ ID NO: 2.

[0015] In some embodiments, the polypeptide sequence of the recombinant reverse transcriptase comprises at least a substitution or substitution set at amino acid position 454/508, 536/574, 309, 49/173/309/331, 90/331, 63/90/309/574/650, 90/173/209/210/321/574/598, 508/519, 49/63/90/216/309/321/536/574, 49/114/307/309/536, 307/321/536/574/650, 309/331/536/574/598/650, 173/331/536/574/598, 49/300/403, 74/242, 242/298/508/662, 260/509, 102/370/509, 49/173/216/349/536/598, 49/114/216/307/309/331, 49/90/173/216/307, 63/68/81/167/314/447/574, 49/210/307/309/321/536/574/650, 63/90/307/321/331/537/598, 370/464/465/509/554/576, 49/114/173/216/321/574/598, 90/216/321/650, 574/650, 49/209/210/307/309/536/598, 216/536/574, 49/173/210/309/321/536/598, 331/536/598, 321/574, 173/321/331/349/574, 49/307/536, 216/309/574/650, 94/370/474/576, 90/209/210/309/321/574, 49/63/90/173, 298, 49/300/454/662, 68/81/167/298/536, 49/454, 81, 49/114/173/309/349/536/574/650, 167/261/303/536, 18/102/554, 171/173/307/331/536, 173/216/536, 18/370/464/509, 49/114, 90/216/309/536/574, 444, 90/321/349/536/598/650, 49/163/309/321/536/574/650, 49/63/90/173/307/331/536/598/650, 68/81/167/258/447/466/536, 90/331/574, 49/321, 94/509, 90/173/321/536, 167/298/447/466, 173/216/307/309/536, 216/321, 49/90/173/209/309/331, 261/298/303/447/574, 171/298/444/519, 90/536/574/598/650, 49/63/90/210/307/321/598/650, 90/216/307/536/574, 18/94/102/260/370/464/554, 18/423/465/474, 167/261/447/536, 114/173/209/210, 307/309/536/574/598, 102/260/370/576, 574, 173/209/210/307/536, 216/309/536, 349, 447/536/606, 310/454/479/519/662, 49/90/209/598, 314/536, 171/300/454/479/508/662, 171/242/300/508/662, 49/331/536, 173/216/309/536/574/598, 536/598, 167/261/298/303/447/466/574, 173/536/598, 49/114/309/536/574/598, 49/114/309/349/536, 63/68/81/303/466, 63/90/209/216/307/309/321/349/536/574/598/650, 216, 173/210/307/598/650, 25/102/370/423, 68/261/298/303, 423/474, 94/423/474/554/576, 63/298/447/574, 49/63/90/173/307/321/331/574/595/650, 49/90/536/574, 508, 63/81/167/258/261/298/303/447, 114/331, 212/298/583/606, 49/173/536/574, 49/242/298/300/310/444/454/479, 49/309/321/536/598, 63/68/261/536, 300/444/508, or 298, wherein the amino acid positions are relative to the reference sequence of SEQ ID NO: 2.

[0016] In some embodiments, the polypeptide sequence of the recombinant reverse transcriptase comprises at least a substitution or substitution set at amino acid position 134, 74, 83, 319, 92, 329, 343,311,338,196,69,72,294,83,134,130,305,319,113,297,319,114,308,309,342,205,212, 199,83,303,309,78,113,132,311,119,83,98,314,129,343,196,74,356,89,212, 444/508/509/574, 63/260/298/300/331/444/509, 63/90/209/444/508/574, 298/444/509, 63/90/508/509/574/595, 83, 311, 89, 130, 178, 118, or combinations thereof, wherein the amino acid positions are relative to the reference sequence of SEQ ID NO: 2.

[0017] In some embodiments, the polypeptide sequence of the recombinant reverse transcriptase comprises at least a substitution or substitution set at amino acid position 309/342, 309, 129, 574, 85, 98/119/129/132/196, 98/317/343/356, 205/212/309/319/342, 78/132/314, 78/83/98, 78/83/119/132/196, 78/83, 78/83/356, 78, 119/129/132, 178/303/331/338/508, 311/314, 63/297/303/305, 63/178/209/260/574, 63/300/338, 83/294, 83/92/343/574, 83/92/134/574, 83/196/329/343, 83/196, 83/134/196/294/305/311/319/329/343/574, 83, 83/309, 83/319/342, 83/205, 83/114, 83/114/309, 83/114/319, 83/199/212/309/319/639, 83/199, 83/342, 83/308/309/595/638, 83/113/114/205/212, 83/130, 114/309, 114/212/309/342/639, 114/205, 114, 114/130/319, 114/130/212/342, 114/130/309, 199/309, 199/205, 342, 343/595, 74, 74/129, 74/83/129/132/212, 74/83/92/343, 74/83/134/294/574, 74/83, 74/329/574, 74/92/196/294/329, 92, 72, 72/294/311/329/343, 72/294, 72/294/311/329, 72/83/343, 72/74/294, 72/74/83/319/329, 72/74/83/84, 72/74/83/134/196/294, 72/74, 72/74/92/294/329, 72/74/92, 72/74/92/134/343, 72/74/134/196/319/329, 72/196/311/329/574, 72/134/196, 118/178/338, 69/89/178/303/305/338/574, 113, 113/178/260, 113/309, 113/212/309, 113/342, 113/114, 113/114/212, 113/114/205/319/342, 113/114/342, 113/114/130, 130/205/333, 134, or 134/294, wherein the amino acid positions are relative to the reference sequence of SEQ ID NO:2.

[0018] In some embodiments, the polypeptide sequence of the recombinant reverse transcriptase comprises at least a substitution or substitution set 266V/454A/508L, 266V/536E/574Q, 266V/309P, 49G/173A/266V/309P/331E, 90I/266V/331E, 63L/90I/266V/309P/574D/650G, 90I/173A/209A/210L/266V/321A/574D/5985, 266V/508L/519P, 49G/63L/90I/216R/266V/309P/321A/536E/574D, 49G/114K/266V/307N/309P/536E, 266V/307K/321A/536E/574D/650G, 266V/309P/331E/536E/574Q/598S/650G, 173A/266V/331E/536E/574D/598S, 49G/266V/300I/403H, 74K/242A/266V, 242A/266V/298E/508L/662R, 260G/266V/509E, 102C/266V/370G/509E, 49G/173A/216R/266V/349G/536E/5985, 49G/114K/216R/266V/307K/309P/331E, 49G/90I/173A/216R/266V/307K, 63P/68S/81K/167Y/266V/314A/447G/574Q, 49G/210L/266V/307K/309P/321A/536E/574D/650G, 63L/90I/266V/307K/321A/331E/537W/598S, 266V/370G/464L/465S/509E/554T/576I, 49G/114K/173A/216R/266V/321A/574D/598S, 90I/216R/266V/321A/650G, 266V/574D/650G, 49G/209A/210L/266V/307K/309P/536E/598S, 216R/266V/536E/574Q, 49G/173A/210L/266V/309P/321A/536E/5985, 266V/331E/536E/598S, 266V/321A/574D, 173A/266V/321A/331E/349G/574D, 49G/266V/307K/536E, 216R/266V/309P/574D/650G, 94L/266V/370G/474A/576I, 90I/209A/210L/266V/309P/321A/574D, 49G/63L/90I/173A/266V, 266V/298E, 49G/266V/300I/454A/662R, 68S/81K/167Y/266V/298R/536N, 49G/266V/454A, 81K/266V, 49G/114K/173A/266V/309P/349G/536E/574D/650G, 167Y/261N/266V/303Q/536N, 18E/102C/266V/554T, 171L/173A/266V/307K/331E/536E, 173A/216R/266V/536E, 18E/266V/370G/464L/509E, 49G/114K/266V, 90I/216R/266V/309P/536G/574D, 266V/444L, 90I/266V/321A/349G/536G/598S/650G, 49G/163P/266V/309P/321A/536E/574D/650G, 49G/63L/90I/173A/266V/307K/331E/536E/598S/650G, 68S/81K/167Y/258T/266V/447G/466K/536N, 90I/266V/331E/574D, 49G/266V/321A, 94L/266V/509E, 90I/173A/266V/321A/536E, 167Y/266V/298R/447G/466K, 173A/216R/266V/307K/309P/536E, 216R/266V/321A, 49G/90I/173A/209A/266V/309P/331E, 261N/266V/298R/303Q/447R/574Q, 171P/266V/298E/444L/519P, 90I/266V/536E/574D/598S/650G, 49G/63L/90I/210L/266V/307K/321A/598S/650G, 90I/216R/266V/307K/536E/574D, 18E/94L/102C/260G/266V/370G/464L/554T, 18E/266V/423R/465S/474A, 167Y/261N/266V/447G/536G, 114K/173A/209A/210L/266V, 266V/307K/309P/536E/574D/598S, 102C/260G/266V/370G/576I, 266V/574D, 173A/209A/210L/266V/307K/536E, 216R/266V/309P/536E, 266V/349G, 266 V/447L/536A/606Q, 266V/310R/454A/479D/519P/662R, 49G/90I/209A/266V/598S, 266V/314K/536N, 171P/266V/300I/454A/479D/508L/662R, 171P/242A/266V/300I/508L/662R, 49G/266V/331E/536E, 173A/216R/266V/309P/536E/574D/598S, 266V/536E/598S, 167Y/261N/266V/298R/303Q/447R/466K/574Q, 173A/266V/536E/598S, 49G/114K/266V/309P/536E/574D/598S, 49G/114K/266V/309P/349G/536E, 63P/68S/81K/266V/303Q/466K, 63L/90I/209A/216R/266V/307K/309P/321A/349G/536E/574D/598S/650G, 216R/266V, 173A/210L/266V/307K/598S/650G, 25E/102C/266V/370G/423R, 68S/261N/266V/298R/303Q, 266V/423R/474A, 94L/266V/423R/474A/554T/576I, 63P/266V/298R/447R/574Q, 49G/63L/90I/173A/266V/307K/321A/331E/574D/595N/650G, 49G/90I/266V/536E/574D, 266V/508L, 63P/81K/167Y/258T/266V/261N/298R/303Q/447G, 114K/266V/331E, 212N/266V/298E/583K/606K, 49G/173A/266V/536E/574Q, 49G/242A/266V/298E/300I/310R/444L/454A/479D, 49G/266V/309P/321A/536E/598S, 63P/68S/261N/266V/536G, 266V/300I/444L/508L, or 266V/298R, wherein the amino acid positions are relative to the reference sequence of SEQ ID NO:2.

[0019] In some embodiments, the polypeptide sequence of the recombinant reverse transcriptase comprises at least a substitution or substitution set 49G/134P/266V/307K/536E, 49G/74P/266V/307K/536E, 49G/83A/266V/307K/536E, 49G/266V/307K/319G/536E, 49G/92T/266V/307K/536E, 49G/266V/307K/329S/536E, 49G/266V/307K/343A/536E, 49G/266V/307K/311P/536E, 49G/266V/307K/338V/536E, 49G/196C/266V/307K/536E, 49G/69R/266V/307K/536E, 49G/72M/266V/307K/536E, 49G/266V/294Q/307K/536E, 49G/83W/266V/294Q/307K/536E, 49G/134F/266V/307K/536E, 49G/130S/266V/307K/536E, 49G/266V/305P/307K/536E, 49G/266V/307K/319S/536E, 49G/113T/266V/307K/536E, 49G/266V/297W/307K/536E, 49G/266V/307K/319C/536E, 49G/114G/266V/307K/536E, 49G/266V/307K/308G/536E, 49G/266V/307K/309E/536E, 49G/266V/307K/342W/536E, 49G/205M/266V/307K/536E, 49G/212K/266V/307K/536E, 49G/199L/266V/307K/536E, 49G/83C/266V/307K/536E, 49G/266V/303G/307K/536E, 49G/266V/307K/309T/536E, 49G/78V/266V/307K/536E, 49G/113G/266V/307K/536E, 49G/132F/266V/307K/536E, 49G/266V/307K/311I/536E, 49G/119Y/266V/307K/536E, 49G/83E/266V/307K/536E, 49G/98S/266V/307K/536E, 49G/266V/307K/314M/536E, 49G/129L/266V/307K/536E, 49G/266V/307K/343V/536E, 49G/196H/266V/307K/536E, 49G/74M/266V/307K/536E, 49G/266V/307K/356P/536E, 49G/89A/266V/307K/536E, 49G/212V/266V/307K/536E, 49G/266V/307K/444L/508L/509E/536E/574D, 49G/63L/260G/266V/298R/300I/307K/331E/444L/509E/536E , 49G/63L/90I/209A/266V/307K/444L/508L/536E/574Q, 49G/266V/298R/307K/444L/509E/536E, 49G/63L/90I/266V/307K/508L/509E/536E/574Q/595N, 49G/83R/266V/307K/536E, 49G/266V/307K/311A/536E, 49G/89M/266V/307K/536E, 49G/130R/266V/307K/536E, 49G/178L/266V/307K/536E, or 49G/118R/266V/307K/536E, wherein the amino acid positions are relative to the reference sequence of SEQ ID NO:2.

[0020] In some embodiments, the polypeptide sequence of the recombinant reverse transcriptase comprises at least a substitution or substitution set 49G/266V/298R/307K/309E/342W/444L/509E/536E, 49G/266V/298R/307K/309T/444L/509E/536E, 49G/129L/266V/307K/444L/509E/536E, 49G/266V/298R/307K/444L/536E/574Q, 49G/85R/266V/298R/307K/444L/509E/536E, 49G/985/119Y/129L/132F/196H/266V/307K/444L/509E/536E, 49G/985/266V/307K/317C/343V/356P/444L/509E/536E, 49G/205M/212K/266V/307K/309E/319S/342W/444L/536E, 49G/266V/298R/307K/509E/536E, 49G/78V/132F/266V/298R/307K/314M/444L/509E/536E, 49G/78V/83E/98S/266V/298R/307K/444L/509E/536E, 49G/78V/83E/119Y/132F/196H/266V/298R/307K/509E/536E, 49G/78V/83E/266V/307K/444L/509E/536E, 49G/78V/83E/266V/307K/444L/536E, 49G/78V/83E/266V/307K/356P/444L/509E/536E, 49G/78V/266V/307K/509E/536E, 49G/119Y/129L/132F/266V/298R/307K/444L/509E/536E, 49G/178L/266V/303G/307K/331E/338V/444L/508L/509E/536E, 49G/266V/298R/307K/311I/314M/444L/509E/536E, 49G/63L/266V/297W/298R/303G/305P/307K/509E/536E, 49G/63L/178L/209A/260G/266V/298R/307K/444L/509E/536E/574Q, 49G/63L/266V/298R/300I/307K/338V/444L/509E/536E, 49G/83A/266V/294Q/298R/307K/444L/509E/536E, 49G/83A/92T/266V/307K/343A/444L/509E/536E/574Q, 49G/83A/92T/134P/266V/298R/307K/509E/536E/574Q, 49G/83A/196C/266V/298R/307K/329S/343A/444L/509E/536E, 49G/83A/196C/266V/307K/444L/536E, 49G/83A/134F/196C/294Q/266V/305S/307K/311P/319G/329S/343A/509E/536E/574Q, 49G/83C/266V/298R/307K/444L/509E/536E, 49G/83C/266V/298R/307K/309T/444L/509E/536E, 49G/83C/266V/298R/307K/319S/342W/444L/536E, 49G/83C/205M/266V/298R/307K/509E/536E, 49G/83C/266V/298R/307K/509E/536E, 49G/83C/114G/266V/298R/307K/444L/509E/536E, 49G/83C/114G/266V/298R/307K/309T/444L/536E, 49G/83C/114G/266V/307K/319C/444L/509E/536E, 49G/83C/199L/212K/266V/307K/309E/319C/509E/536E/639H, 49G/83C/199L/266V/298R/307K/444L/536E, 49G/83C/266V/307K/444L/509E/536E, 49G/83C/266V/307K/342W/444L/509E/536E, 49G/83C/266V/298R/307K/308G/309E/444L/509E/536E/595N/638H, 49G/83C/113T/114G/205M/212K/266V/298R/307K/444L/509E/536E, 49G/83C/130S/266V/307K/509E/536E, 49G/114G/266V/298R/307K/309E/444L/509E/536E, 49G/114G/266V/298R/307K/309E/444L/536E, 49G/114G/212K/266V/298R/307K/309E/342W/444L/509E/536E/639H, 49G/114G/205M/266V/298R/307K/509E/536E, 49G/114G/266V/307K/444L/509E/536E, 49G/114G/1305S/266V/298R/307K/319S/509E/536E, 49G/114G/130S/212K/266V/307K/342W/444L/509E/536E, 49G/114G/130S/266V/307K/309E/444L/509E/536E, 49G/199L/266V/298R/307K/309T/444L/509E/536E, 49G/199L/205M/266V/298R/307K/509E/536E, 49G/266V/307K/444L/509E/536E, 49G/266V/307K/342W/444L/509E/536E, 49G/266V/307K/444L/536E, 49G/266V/307K/343A/509E/536E/595N, 49G/74M/266V/298R/307K/444L/509E/536E, 49G/74M/129L/266V/307K/509E/536E, 49G/74M/83E/129L/132F/212V/266V/298R/307K/444L/536E, 49G/74P/83A/92T/266V/307K/343A/444L/536E, 49G/74P/83A/134P/266V/294Q/307 K/444L/509E/536E/574Q, 49G/74P/83W/266V/298R/307K/536E, 49G/74P/266V/307K/329S/509E/536E/574Q, 49G/74P/92T/196C/266V/294Q/298R/307K//329S/444L/509E/536E, 49G/92T/266V/307K/444L/536E, 49G/72M/266V/298R/307K/444L/509E/536E, 49G/72M/266V/294Q/298R/307K/311A/329S/343A/509E/536E, 49G/72M/266V/294Q/307K/509E/536E, 49G/72M/266V/294Q/307K/311A/329S/509E/536E, 49G/72M/266V/298R/307K/444L/536E, 49G/72M/83A/266V/307K/343A/509E/536E, 49G/266V/72M/74P/294Q/307K/509E/536E, 49G/72M/74P/83A/266V/298R/307K/319G/329S/444L/536E, 49G/72M/74P/83A/84N/266V/298R/307K/509E/536E, 49G/72M/74P/83A/134F/196C/266V/294Q/307K/444L/509E/536E, 49G/72M/74P/266V/307K/444L/536E, 49G/72M/74P/92T/266V/294Q/307K/329S/444L/509E/536E, 49G/72M/74P/92T/266V/307K/444L/509E/536E, 49G/72M/74P/92T/134P/266V/307K/343A/509E/536E, 49G/72M/74P/134F/196C/266V/307K/319G/329S/444L/536E, 49G/72M/196C/266V/298R/307K/311A/329S/444L/509E/536E/574Q, 49G/72M/134P/196C/266V/307K/444L/509E/536E, 49G/118R/178L/266V/298R/307K/338V/444L/509E/536E, 49G/69R/89A/178L/266V/298R/303G/305P/307K/338V/444L/509E/536E/574Q, 49G/113G/266V/298R/307K/444L/509E/536E, 49G/113G/178L/260G/266V/298R/307K/444L/509E/536E, 49G/113T/266V/298R/307K/309E/444L/509E/536E, 49G/113T/212K/266V/298R/307K/309E/444L/509E/536E, 49G/113T/266V/298R/307K/342W/444L/509E/536E, 49G/113T/114G/266V/298R/307K/444L/509E/536E, 49G/113T/114G/212K/266V/298R/307K/444L/509E/536E, 49G/113T/114G/205M/266V/298R/307K/319C/342W/444L/509E/536E, 49G/113T/114G/266V/307K/342W/444L/509E/536E, 49G/113T/114G/1305S/266V/298R/307K/444L/509E/536E, 49G/113T/266V/307K/444L/509E/536E, 49G/113T/266V/298R/307K/309E/509E/536E, 49G/130S/205M/266V/298R/307K/333V/509E/536E, 49G/134P/266V/298R/307K/444L/509E/536E, or 49G/134P/266V/294Q/298R/307K/536E, wherein the amino acid positions are relative to the reference sequence of SEQ ID NO:2.

[0021] In some embodiments, a recombinant reverse transcriptase of the present disclosure comprises a polypeptide sequence having at least 75%, 80%, 81%, 82%, 83%, 84%, 85%, 86%, 87%, 88%, 89%, 90%, 91%, 92%, 93%, 94%, 95%, 96%, 97%, 98%, 99%, or more sequence identity to a reference sequence corresponding to residues 12 to 687 of SEQ ID NO: 24, 94, or 352, or to a reference sequence corresponding to SEQ ID NO: 24, 94, or 352.

[0022] In some embodiments, a recombinant reverse transcriptase comprises a polypeptide sequence having at least 75%, 80%, 81%, 82%, 83%, 84%, 85%, 86%, 87%, 88%, 89%, 90%, 91%, 92%, 93%, 94%, 95%, 96%, 97%, 98%, 99%, or more sequence identity to a reference sequence corresponding to residues 12 to 687 of SEQ ID NO: 24, 94, or 352, or to a reference sequence corresponding to SEQ ID NO: SEQ ID NO: 24, 94, or 352, wherein the polypeptide sequence comprises one or more substitutions relative to the reference sequence corresponding to residues 12 to 687 of SEQ ID NO: 24, 94, or 352, or to the reference sequence corresponding to SEQ ID NO: 24, 94, or 352.

[0023] In some embodiments, the polypeptide sequence of the recombinant reverse transcriptase comprises at least a substitution at amino acid position 18, 25, 49, 63, 68, 69, 72, 74, 78, 81, 83, 89, 90, 92, 94, 98, 102, 113, 114, 118, 119, 129, 130, 132, 134, 163, 167, 171, 173, 178, 196, 199, 205, 209, 210, 212, 216, 242, 258, 260, 261, 266, 294, 297, 298, 300, 303, 305, 307, 308, 309, 310, 311, 314, 319, 321, 329, 331, 338, 342, 343, 349, 356, 370, 403, 423, 444, 447, 454, 464, 465, 466, 474, 479, 508, 509, 519, 536, 537, 554, 574, 576, 583, 595, 598, 606, 650, 662, or 665, or combinations thereof, wherein the amino acid positions are relative to the reference sequence of SEQ ID NO: 24, 94, or 352.

[0024] In some embodiments, the polypeptide sequence of the recombinant reverse transcriptase comprises at least an amino acid residue 18E, 25E, 49G, 63L/P, 68S, 69R, 72M, 74K/M/P, 78V, 81K, 83E/A/C/R/W, 89A/M, 90I, 92T, 94L, 98S, 102C, 113G/T, 114G/K, 118R, 119Y, 129L, 130R/S, 132F, 134F/P, 163P, 167Y, 171L, 173A, 178L, 196C/H, 199L, 205M, 209A, 210L, 212K/NN, 216R, 242A, 258T, 260G, 261N, 266V, 294Q, 297W, 298E/R, 3001, 303G/Q, 305P, 307K/N, 308G, 309E/P/T, 310R, 311A/I/P, 314A/K/M, 319C/G/S, 321A, 329S, 331E, 338V, 342W, 343A/V, 349G, 356P, 370G, 403H, 444L, 447G/L/R, 454A, 464L, 465S, 466K, 474A, 479D, 508L, 509E, 519P, 536E/A/N, 537W, 554T, 574D/Q, 576I, 583K, 595N, 598S, 606K/Q, or 662R, or combinations thereof, wherein the amino acid positions are relative to the reference sequence of SEQ ID NO: 24, 94, or 352.

[0025] the polypeptide sequence of the recombinant reverse transcriptase comprises at least a substitution at amino acid position 49, 266, 298, 307, 444, 509, or 536, or combinations thereof, wherein the amino acid positions are relative to the reference sequence of SEQ ID NO: 24, 94, or 352.

[0026] In some embodiments, a recombinant reverse transcriptase comprises a polypeptide sequence having at least 75%, 80%, 81%, 82%, 83%, 84%, 85%, 86%, 87%, 88%, 89%, 90%, 91%, 92%, 93%, 94%, 95%, 96%, 97%, 98%, 99%, or more sequence identity to a reference sequence corresponding to residues 12 to 687 of SEQ ID NO: 24, or to a reference sequence corresponding to SEQ ID NO: 24, wherein the polypeptide sequence comprises one or more substitutions relative to the reference sequence corresponding to residues 12 to 687 of SEQ ID NO: 24, or to the reference sequence corresponding to SEQ ID NO: 24.

[0027] In some embodiments, the polypeptide sequence of the recombinant reverse transcriptase comprises at least a substitution or substitution set at amino acid position 454/508, 536/574, 309, 49/173/309/331, 90/331, 63/90/309/574/650, 90/173/209/210/321/574/598, 508/519, 49/63/90/216/309/321/536/574, 49/114/307/309/536, 307/321/536/574/650, 309/331/536/574/598/650, 173/331/536/574/598, 49/300/403, 74/242, 242/298/508/662, 260/509, 102/370/509, 49/173/216/349/536/598, 49/114/216/307/309/331, 49/90/173/216/307, 63/68/81/167/314/447/574, 49/210/307/309/321/536/574/650, 63/90/307/321/331/537/598, 370/464/465/509/554/576, 49/114/173/216/321/574/598, 90/216/321/650, 574/650, 49/209/210/307/309/536/598, 216/536/574, 49/173/210/309/321/536/598, 331/536/598, 321/574, 173/321/331/349/574, 49/307/536, 216/309/574/650, 94/370/474/576, 90/209/210/309/321/574, 49/63/90/173, 298, 49/300/454/662, 68/81/167/298/536, 49/454, 81, 49/114/173/309/349/536/574/650, 167/261/303/536, 18/102/554, 171/173/307/331/536, 173/216/536, 18/370/464/509, 49/114, 90/216/309/536/574, 444, 90/321/349/536/598/650, 49/163/309/321/536/574/650, 49/63/90/173/307/331/536/598/650, 68/81/167/258/447/466/536, 90/331/574, 49/321, 94/509, 90/173/321/536, 167/298/447/466, 173/216/307/309/536, 216/321, 49/90/173/209/309/331, 261/298/303/447/574, 171/298/444/519, 90/536/574/598/650, 49/63/90/210/307/321/598/650, 90/216/307/536/574, 18/94/102/260/370/464/554, 18/423/465/474, 167/261/447/536, 114/173/209/210, 307/309/536/574/598, 102/260/370/576, 574, 173/209/210/307/536, 216/309/536, 349, 447/536/606, 310/454/479/519/662, 49/90/209/598, 314/536, 171/300/454/479/508/662, 171/242/300/508/662, 49/331/536, 173/216/309/536/574/598, 536/598, 167/261/298/303/447/466/574, 173/536/598, 49/114/309/536/574/598, 49/114/309/349/536, 63/68/81/303/466, 63/90/209/216/307/309/321/349/536/574/598/650, 216, 173/210/307/598/650, 25/102/370/423, 68/261/298/303, 423/474, 94/423/474/554/576, 63/298/447/574, 49/63/90/173/307/321/331/574/595/650, 49/90/536/574, 508, 63/81/167/258/261/298/303/447, 114/331, 212/298/583/606, 49/173/536/574, 49/242/298/300/310/444/454/479, 49/309/321/536/598, 63/68/261/536, 300/444/508, or 298, wherein the amino acid positions are relative to the reference sequence of SEQ ID NO: 24.

[0028] In some embodiments, a recombinant reverse transcriptase comprises a polypeptide sequence having at least 75%, 80%, 81%, 82%, 83%, 84%, 85%, 86%, 87%, 88%, 89%, 90%, 91%, 92%, 93%, 94%, 95%, 96%, 97%, 98%, 99%, or more sequence identity to a reference sequence corresponding to residues 12 to 687 of SEQ ID NO: 94, or to a reference sequence corresponding to SEQ ID NO: 94, wherein the polypeptide sequence comprises one or more substitutions relative to the reference sequence corresponding to residues 12 to 687 of SEQ ID NO: 94, or to the reference sequence corresponding to SEQ ID NO: 94.

[0029] In some embodiments, the polypeptide sequence of the recombinant reverse transcriptase comprises at least a substitution or substitution set at amino acid position 134, 74, 83, 319, 92, 329, 343, 311, 338, 196, 69, 72, 294, 83, 134, 130, 305, 319, 113, 297, 319, 114, 308, 309, 342, 205, 212, 199, 83, 303, 309, 78, 113, 132, 311, 119, 83, 98, 314, 129, 343, 196, 74, 356, 89, 212, 444/508/509/574, 63/260/298/300/331/444/509, 63/90/209/444/508/574, 298/444/509, 63/90/508/509/574/595, 83, 311, 89, 130, 178, or 118, wherein the amino acid positions are relative to the reference sequence of SEQ ID NO: 94.

[0030] The recombinant reverse transcriptase of claim 20, comprising a polypeptide sequence having at least 75%, 80%, 81%, 82%, 83%, 84%, 85%, 86%, 87%, 88%, 89%, 90%, 91%, 92%, 93%, 94%, 95%, 96%, 97%, 98%, 99%, or more sequence identity to a reference sequence corresponding to residues 12 to 687 of SEQ ID NO: 352, or to a reference sequence corresponding to SEQ ID NO: 352, wherein the polypeptide sequence comprises one or more substitutions relative to the reference sequence corresponding to residues 12 to 687 of SEQ ID NO: 352, or to the reference sequence corresponding to SEQ ID NO: 352.

[0031] In some embodiments, the polypeptide sequence of the recombinant reverse transcriptase comprises at least a substitution or substitution set at amino acid position 309/342, 309, 129/298, 509/574, 85, 98/119/129/132/196/298, 98/298/317/343/356, 205/212/298/309/319/342/509, 444, 78/132/314, 78/83/98, 78/83/119/132/196/444, 78/83/298, 78/83/298/509, 78/83/298/356, 78/298/444, 119/129/132, 178/298/303/331/338/508, 311/314, 63/297/303/305/444, 63/178/209/260/574, 63/300/338, 83/294, 83/92/298/343/574, 83/92/134/444/574, 83/196/329/343, 83/196/298/509, 83/134/196/294/298/305/311/319/329/343/444/574, 83, 83/309, 83/319/342/509, 83/205/444, 83/444, 83/114, 83/114/309/509, 83/114/298/319, 83/199/212/298/309/319/444/639, 83/199/509, 83/298, 83/298/342, 83/308/309/595/638, 83/113/114/205/212, 83/130/298/444, 114/309, 114/309/509, 114/212/309/342/639, 114/205/444, 114/298, 114/130/319/444, 114/130/212/298/342, 114/130/298/309, 199/309, 199/205/444, 298, 298/342, 298/509, 298/343/444/595, 74, 74/129/298/444, 74/83/129/132/212/509, 74/83/92/298/343/509, 74/83/134/294/298/574, 74/83/444/509, 74/298/329/444/574, 74/92/196/294/329, 92/298/509, 72, 72/294/311/329/343/444, 72/294/298/444, 72/294/298/311/329/444, 72/509, 72/83/298/343/444, 72/74/294/298/444, 72/74/83/319/329/509, 72/74/83/84/444, 72/74/83/134/196/294/298, 72/74/298/509, 72/74/92/294/298/329, 72/74/92/298, 72/74/92/134/298/343/444, 72/74/134/196/298/319/329/509, 72/196/311/329/574, 72/134/196/298, 118/178/338/444, 69/89/178/303/305/338/444/574, 113, 113/178/260, 113/309, 113/212/309, 113/342, 113/114, 113/114/212, 113/114/205/319/342, 113/114/298/342, 113/114/130, 113/298, 113/298/309/444, 130/205/333/444, 134, or 134/294/444/509, wherein the amino acid positions are relative to the reference sequence of SEQ ID NO:352.

[0032] In some embodiments, a recombinant reverse transcriptase comprises a polypeptide sequence having at least 75%, 80%, 85%, 86%, 87%, 88%, 89%, 90%, 91%, 92%, 93%, 94%, 95%, 96%, 97%, 98%, 99% or more sequence identity to a sequence corresponding to residues 12 to 687 of at least one recombinant reverse transcriptase variant set forth in Table 4.1, 5.1, 6.1, and 7.1.

[0033] In some embodiments, a recombinant reverse transcriptase comprises a polypeptide sequence having at least 75%, 80%, 85%, 86%, 87%, 88%, 89%, 90%, 91%, 92%, 93%, 94%, 95%, 96%, 97%, 98%, 99% or more sequence identity to a sequence of a recombinant reverse transcriptase variant set forth in Table 4.1, 5.1, 6.1, and 7.1.

[0034] In some embodiments, the recombinant reverse transcriptase comprises a polypeptide sequence comprising residues 12 to 687 of an even-numbered sequence of SEQ ID NOS: 4-566, wherein the polypeptide sequence optionally has 1, 2, 3, 4, 5, 6, 7, 8, 9, or up to 10 substitutions in the polypeptide sequence.

[0035] In some embodiments, the recombinant reverse transcriptase comprises a polypeptide sequence comprising an even-numbered sequence of SEQ ID NOS: 4-566, wherein the polypeptide sequence optionally has 1, 2, 3, 4, 5, 6, 7, 8, 9, or up to 10 substitutions in the polypeptide sequence.

[0036] In some embodiments, the recombinant reverse transcriptase comprises a polypeptide sequence comprising residues 12 to 687 of SEQ ID NO: 4, 24, 94, or 352, or a sequence comprising SEQ ID NO: 4, 24, 94, or 352.

[0037] In some embodiments, the recombinant reverse transcriptase has reverse transcriptase activity. In some embodiments, the recombinant reverse transcriptase has DNA polymerase activity with a RNA or DNA template. In some embodiments, the recombinant reverse transcriptase has at least one improved property as compared to a reference reverse transcriptase. In some embodiments, the recombinant reverse transcriptase has at least one improved property selected from increased activity, increased product yield, increased thermostability, increased salt tolerance, increased RNA template sensitivity, increased processivity, increased fidelity, and increased product yield in a coupled PCR reaction (e.g., RT-qPCR) with a DNA polymerase compared to a reference reverse transcriptase. In some embodiments, the reference reverse transcriptase has the sequence corresponding to residues 12 to 687 of SEQ ID NO: 2, 24, 94, or 352, or a sequence corresponding to SEQ ID NO: 2, 24, 94, or 352. In some embodiments, the reference reverse transcriptase has the sequence corresponding to residues 12 to 687 of SEQ ID NO: 2, or a sequence corresponding to SEQ ID NO: 2.

[0038] In some further embodiments, the recombinant reverse transcriptase is purified. In some embodiments, the recombinant reverse transcriptase is provided in solution, or is immobilized on a substrate, such as surfaces of solid substrates or membranes or particles.

[0039] In another aspect, the present disclosure provides recombinant polynucleotides encoding the recombinant reverse transcriptases provided herein. In some embodiments, the recombinant polynucleotide encodes a recombinant reverse transcriptase, or a functional fragment thereof, comprising a polypeptide sequence having at least 75%, 80%, 85%, 86%, 87%, 88%, 89%, 90%, 91%, 92%, 93%, 94%, 95%, 96%, 97%, 98%, 99%, or more sequence identity to a reference sequence corresponding to residues 12 to 687 of SEQ ID NO: 2, 24, 94, or 352, or to a reference sequence corresponding to SEQ ID NO: 2, 24, 94, or 352, wherein the polypeptide sequence comprises one or more substitutions relative to the reference sequence corresponding to residues 12 to 687 of SEQ ID NO: 2, 24, 94, or 352, or to the reference sequence corresponding to SEQ ID NO: 2, 24, 94, or 352.

[0040] In some embodiments, the recombinant polynucleotide encodes a recombinant reverse transcriptase, or a functional fragment thereof, comprising a polypeptide sequence having at least 75%, 80%, 81%, 82%, 83%, 84%, 85%, 86%, 87%, 88%, 89%, 90%, 91%, 92%, 93%, 94%, 95%, 96%, 97%, 98%, 99%, or more sequence identity to the reference sequence corresponding to residues 12 to 687 of SEQ ID NO: 2, or to the reference sequence corresponding to SEQ ID NO: 2, wherein the polypeptide sequence comprises one or more substitutions relative to the reference sequence corresponding to residues 12 to 687 of SEQ ID NO: 2, or to the reference sequence corresponding to SEQ ID NO: 2.

[0041] In some embodiments, the recombinant polynucleotide comprises a sequence having at least 75%, 80%, 81%, 82%, 83%, 84%, 85%, 90%, 91%, 92%, 93%, 94%, 95%, 96%, 97%, 98%, 99%, or more sequence identity to a reference polynucleotide sequence corresponding to residues 34 to 2061 of SEQ ID NO: 1, 23, 93, or 351, or to a reference polynucleotide sequence corresponding to SEQ ID NO: 1, 23, 93, or 351, wherein the recombinant polynucleotide encodes a recombinant reverse transcriptase. In some embodiments, the reverse transcriptase polynucleotide encodes a recombinant reverse transcriptase or a functional fragment thereof, wherein the recombinant reverse transcriptase comprises at least one substitution at one or more amino acid positions relative to the reference polypeptide sequence of SEQ ID NO: 2.

[0042] In some embodiments, the recombinant polynucleotide comprises a sequence having at least 75%, 80%, 81%, 82%, 83%, 84%, 85%, 86%, 87%, 88%, 89%, 90%, 91%, 92%, 93%, 94%, 95%, 96%, 97%, 98%, 99%, or more sequence identity to a reference polynucleotide sequence corresponding to nucleotide residues 34 to 2061 of an odd numbered polynucleotide sequence of SEQ ID NOS: 3-565, wherein the polynucleotide encodes a recombinant reverse transcriptase.

[0043] In some embodiments, the recombinant polynucleotide comprises a sequence having at least 75%, 80%, 81%, 82%, 83%, 84%, 85%, 86%, 87%, 88%, 89%, 90%, 91%, 92%, 93%, 94%, 95%, 96%, 97%, 98%, 99%, or more sequence identity to a reference polynucleotide sequence comprising an odd numbered polynucleotide sequence of SEQ ID NOS: 3-565, wherein the polynucleotide encodes a recombinant reverse transcriptase.

[0044] In some embodiments, the recombinant polynucleotide comprises a sequence comprising nucleotide residues 34 to 2061 of an odd numbered polynucleotide sequence of SEQ ID NOS: 3-565. In some embodiments, the recombinant polynucleotide comprises a sequence comprising an odd numbered polynucleotide sequence of SEQ ID NOS: 3-565.

[0045] In some embodiments, the recombinant polynucleotide encoding a recombinant reverse transcriptase is codon optimized for expression in a cell, for example bacterial cell or mammalian cell.

[0046] In a further aspect, the present disclosure provides expression vectors comprising at least one recombinant polynucleotide provided herein encoding a recombinant reverse transcriptase. In some embodiments, the recombinant polynucleotide encoding a recombinant reverse transcriptase in the expression vector is operably linked to a control sequence. In some embodiments, the control sequence comprises a promoter, for example a heterologous promoter.

[0047] In another aspect, the present disclosure also provides host cells transformed with at least one recombinant polynucleotide encoding the recombinant reverse transcriptase or an expression vector provided herein. In some embodiments, the host cell is a prokaryotic or eukaryotic cell. In some embodiments, the host cell is a bacterial cell, such as E. coli. or B. subtilis.

[0048] In a further aspect, the present disclosure provides methods of producing a recombinant reverse transcriptase polypeptide in a host cell, the method comprising culturing a host cell provided herein, under suitable culture conditions, such that at least one recombinant reverse transcriptase is produced. In some embodiments, the method further comprises recovering the recombinant reverse transcriptase from the culture and/or host cells. In some embodiments, the method further comprises the step of purifying the recombinant reverse transcriptase.

[0049] In another aspect, the present disclosure provides compositions comprising at least one recombinant reverse transcriptase provided herein. In some embodiments, the composition comprises one or more of a buffer, nucleotide substrates, and/or oligonucleotide primer substrate. In some embodiments, the composition further comprises a second DNA polymerase, such as a thermostable DNA polymerase, e.g., Tag or Pfu DNA polymerase.

[0050] In a further aspect, the present disclosure provides uses of the recombinant reverse transcriptase in methods of preparing a complementary DNA (cDNA) copy of a target RNA, whole or in part. In some embodiments, the present disclosure provides a method of preparing a complementary DNA of a target RNA, comprising contacting a target RNA with a recombinant reverse transcriptase described herein in presence of appropriate substrates under conditions suitable for reverse transcriptase mediated production of a DNA complementary to the target RNA.

[0051] In some embodiments, the recombinant reverse transcriptase is used to detect a target RNA, the method comprising contacting a sample suspected of containing a target RNA with a recombinant reverse transcriptase of the present disclosure in presence of appropriate substrates under conditions suitable for reverse transcriptase mediated production of a DNA complementary to the target RNA, whole or in part, and detecting presence of the complementary DNA. In some embodiments, the sample is a biological or environmental sample. In some embodiments, detecting the complementary DNA is by amplifying the complementary DNA product, such as by polymerase chain reaction (PCR) or LAMP.

[0052] In a further aspect, the present disclosure also provides kits comprising at least one recombinant reverse transcriptase of the present disclosure. In some embodiments, the kits can further comprise one or more of a buffer, nucleotide substrate, and/or oligonucleotide primer substrate. In some embodiments, the kits further includes a second DNA polymerase, for example a thermostable DNA polymerase.

### DETAILED DESCRIPTION

[0053] The present disclosure provides recombinant reverse transcriptase polypeptides and compositions thereof, as well as polynucleotides encoding the recombinant reverse transcriptase polypeptides. The present disclosure also provides methods of using the recombinant reverse transcriptase polypeptides, including compositions thereof, for diagnostic and other purposes. In some embodiments, the recombinant reverse transcriptase polypeptides are optimized to provide enhanced polymerization activity with high replication fidelity and processivity, particularly under conditions involving low concentrations of RNA input or for high-throughput analysis.

[0054] In a further aspect, the present disclosure provides methods and compositions comprising the recombinant reverse transcriptases, for example for diagnostic and research purposes. In some embodiments, the recombinant reverse transcriptases are used in preparing a complementary DNA of a target RNA. In some embodiments, the recombinant reverse transcriptases are used in diagnostic and research applications using small amounts of RNA, for example from biological samples, RNA isolated from virally infected cells, single cells isolated by FACS (fluorescence activated cell sorting), laser-capture microscopy, microfluidic devices, or any other suitable sample.

### Abbreviations and Definitions

[0055] Unless defined otherwise, all technical and scientific terms used herein generally have the same meaning as commonly understood by one of ordinary skill in the art to which this invention pertains. Generally, the nomenclature used herein and the laboratory procedures of cell culture, molecular genetics, microbiology, organic chemistry, analytical chemistry and nucleic acid chemistry described below are those well-known and commonly employed in the art. Such techniques are well-known and described in numerous texts and reference works well known to those of skill in the art. Standard techniques, or modifications thereof, are used for chemical syntheses and chemical analyses.

[0056] Although any suitable methods and materials similar or equivalent to those described herein find use in the practice of the present invention, some methods and materials are described herein. It is to be understood that this invention is not limited to the particular methodology, protocols, and reagents described, as these may vary, depending upon the context they are used by those of skill in the art. Accordingly, the terms defined immediately below are more fully described by reference to the application as a whole.

[0057] As used herein, the singular “a”, “an,” and “the” include the plural references, unless the context clearly indicates otherwise.

[0058] As used herein, the term “comprising” and its cognates are used in their inclusive sense (i.e., equivalent to the term “including” and its corresponding cognates).

[0059] It is to be further understood that where description of embodiments use the term “comprising” and its cognates, the embodiments can also be described using language “consisting essentially of” or “consisting of.”

[0060] Numeric ranges are inclusive of the numbers defining the range. Thus, every numerical range disclosed herein is intended to encompass every narrower numerical range that falls within such broader numerical range, as if such narrower numerical ranges were all expressly written herein. It is also intended that every maximum (or minimum) numerical limitation disclosed herein includes every lower (or higher) numerical limitation, as if such lower (or higher) numerical limitations were expressly written herein.

[0061] As used herein, the term “about” means an acceptable error for a particular value. In some instances “about” means within 0.05%, 0.5%, 1.0%, or 2.0%, of a given value range. In some instances, “about” means within 1, 2, 3, or 4 standard deviations of a given value.

[0062] Furthermore, the headings provided herein are not limitations of the various aspects or embodiments of the invention which can be had by reference to the application as a whole. Accordingly, the terms defined immediately below are more fully defined by reference to the application as a whole. Nonetheless, in order to facilitate understanding of the invention, a number of terms are defined below.

[0063] Unless otherwise indicated, nucleic acids are written left to right in 5′ to 3′ orientation; amino acid sequences are written left to right in amino to carboxy orientation, respectively.

[0064] As used herein, the “EC” number refers to the Enzyme Nomenclature of the Nomenclature Committee of the International Union of Biochemistry and Molecular Biology (NC-IUBMB). The IUBMB biochemical classification is a numerical classification system for enzymes based on the chemical reactions they catalyze.

[0065] As used herein, “ATCC” refers to the American Type Culture Collection whose biorepository collection includes genes and strains.

[0066] As used herein, “NCBI” refers to National Center for Biological Information and the sequence databases provided therein.

[0067] As used herein, the term “DNA” refers to deoxyribonucleic acid.

[0068] As used herein, the term “RNA” refers to ribonucleic acid.

[0069] As used herein, the terms “fusion protein,” and “chimeric protein” and “chimera” refer to hybrid proteins created through the joining of two or more genes that originally encoded separate proteins. In some embodiments, fusion proteins are created by recombinant technology (e.g., molecular biology techniques known in the art).

[0070] As used herein, the term “polymerase” refers to a class of enzymes that polymerize nucleoside triphosphates. Polymerases use a template nucleic acid strand to synthesize a complementary nucleic acid strand. The template strand and synthesized nucleic acid strand can independently be either DNA or RNA. Polymerases known in the art include but are not limited to DNA polymerases (e.g., E. coli DNA poll, T. aquaticus DNA polymerase (Taq), DNA-dependent RNA polymerases, and reverse transcriptases). As used herein, the polymerase is a polypeptide or protein containing sufficient amino acids to carry out a desired enzymatic function of the polymerase. In some embodiments, the polymerase does not contain all of the amino acids found in the native enzyme, but only those which are sufficient to allow the polymerase to carry out a desired catalytic activity, including but not limited to 5′-3′ polymerization, 5′-3′ exonuclease, and 3′-5′ exonuclease activities.

[0071] As used herein, the term “reverse transcriptase” refers to enzymes that are capable of generating DNA using an RNA template. Thus, the term “reverse transcriptase activity” refers to the function of reverse transcriptase enzymes to produce DNA from RNA starting material. In addition, some reverse transcriptase enzymes have RNase activity that degrades the RNA strand in the RNA-DNA hybrid after transcription. In some qPCR reactions, an RNaseH is added to improve efficiency of the reaction.

[0072] As used herein, “quantitative reverse transcription polymerase chain reaction,” “quantitative reverse transcription PCR,” and “RT-qPCR,” refer to a polymerase chain reaction assay in which the starting material is RNA. In this method, the starting RNA, e.g., either total RNA or messenger RNA (mRNA) is first transcribed into complementary DNA (i.e., “cDNA” by a reverse transcriptase). The cDNA produced is then used as the template for the quantitative PCR reaction. RT-qPCR finds use in various applications, including gene expression analysis, RNAi validation, microarray validation, pathogen detection, genetic testing, disease research, and other settings. RT-qPCR may be conducted as a one-step or a two-step process. In the one-step process, reverse transcription and PCR are conducted in a single tube and buffer containing a reverse transcriptase and a DNA polymerase. In the process, only sequence-specific primers are used. In contrast, in the two-step methods, the reverse transcription and PCR steps are conducted separately, each reaction containing buffers, reactions, and primers optimized for each enzyme activity.

[0073] As used herein, the term “DNA polymerase activity,” “synthetic activity,” and “polymerase activity” are used interchangeably herein, and refer to the ability of an enzyme to synthesize new DNA strands by the incorporation of deoxynucleoside triphosphates. In some embodiments, a DNA polymerase can use DNA and/or RNA as a template.

[0074] As used herein, the terms “duplex” and “ds” refer to a double-stranded nucleic acid (e.g., DNA) molecule comprised of two single-stranded polynucleotides that are complementary in their sequence (A pairs to T, C pairs to G), arranged in an antiparallel 5′ to 3′ orientation, and held together by hydrogen bonds between the nucleobases (i.e., adenine [A], guanine [G], cytosine [C], and thymine [T]).

[0075] As used herein, the terms “protein,” “polypeptide,” and “peptide” are used interchangeably herein to denote a polymer of at least two amino acids covalently linked by an amide bond, regardless of length or post-translational modification (e.g., glycosylation or phosphorylation).

[0076] As used herein, the term “amino acids” are referred to by either their commonly known three-letter symbols or by the one-letter symbols recommended by IUPAC-IUB Biochemical Nomenclature Commission. Nucleotides, likewise, may be referred to by their commonly accepted single letter codes. The abbreviations used for the genetically encoded amino acids are conventional and are as follows: alanine (Ala or A), arginine (Arg or R), asparagine (Asn or N), aspartate (Asp or D), cysteine (Cys or C), glutamate (Glu or E), glutamine (Gln or Q), glycine (Gly or G), histidine (His or H), isoleucine (Ile or I), leucine (Leu or L), lysine (Lys or K), methionine (Met or M), phenylalanine (Phe or F), proline (Pro or P), serine (Ser or S), threonine (Thr or T), tryptophan (Trp or W), tyrosine (Tyr or Y), and valine (Val or V). When the three-letter abbreviations are used, unless specifically preceded by an “L” or a “D” or clear from the context in which the abbreviation is used, the amino acid may be in either the L- or D-configuration about α-carbon (C_{α}). For example, whereas “Ala” designates alanine without specifying the configuration about the α-carbon, “D-Ala” and “L-Ala” designate D-alanine and L-alanine, respectively. When the one-letter abbreviations are used, upper case letters designate amino acids in the L-configuration about the a-carbon and lower case letters designate amino acids in the D-configuration about the a-carbon. For example, “A” designates L-alanine and “a” designates D-alanine. When polypeptide sequences are presented as a string of one-letter or three-letter abbreviations (or mixtures thereof), the sequences are presented in the amino (N) to carboxy (C) direction in accordance with common convention.

[0077] The abbreviations used for the genetically encoding nucleosides are conventional and are as follows: adenosine (A); guanosine (G); cytidine (C); thymidine (T); and uridine (U). Unless specifically delineated, the abbreviated nucleosides may be either ribonucleosides or 2′-deoxyribonucleosides. The nucleosides may be specified as being either ribonucleosides or 2′-deoxyribonucleosides on an individual basis or on an aggregate basis. When nucleic acid sequences are presented as a string of one-letter abbreviations, the sequences are presented in the 5′ to 3′ direction in accordance with common convention, and the phosphates are not indicated.

[0078] As used herein, the terms “engineered,” “recombinant,” “non-naturally occurring,” and “variant,” when used with reference to a cell, a polynucleotide or a polypeptide refers to a material or a material corresponding to the natural or native form of the material that has been modified in a manner that would not otherwise exist in nature or is identical thereto but produced or derived from synthetic materials and/or by manipulation using recombinant techniques.

[0079] As used herein, “wild-type” and “naturally-occurring” refer to the form found in nature. For example a wild-type polypeptide or polynucleotide sequence is a sequence present in an organism that can be isolated from a source in nature and which has not been intentionally modified by human manipulation.

[0080] As used herein, “coding sequence” refers to that part of a nucleic acid (e.g., a gene) that encodes an amino acid sequence of a protein.

[0081] As used herein, the term “percent (%) sequence identity” refers to comparisons among polynucleotides and polypeptides, and are determined by comparing two optimally aligned sequences over a comparison window, wherein the portion of the polynucleotide or polypeptide sequence in the comparison window may comprise additions or deletions (i.e. , gaps) as compared to the reference sequence for optimal alignment of the two sequences. The percentage may be calculated by determining the number of positions at which the identical nucleic acid base or amino acid residue occurs in both sequences to yield the number of matched positions, dividing the number of matched positions by the total number of positions in the window of comparison and multiplying the result by 100 to yield the percentage of sequence identity. Alternatively, the percentage may be calculated by determining the number of positions at which either the identical nucleic acid base or amino acid residue occurs in both sequences or a nucleic acid base or amino acid residue is aligned with a gap to yield the number of matched positions, dividing the number of matched positions by the total number of positions in the window of comparison and multiplying the result by 100 to yield the percentage of sequence identity. Those of skill in the art appreciate that there are many established algorithms available to align two sequences. Optimal alignment of sequences for comparison can be conducted, e.g., by the local homology algorithm of Smith and Waterman (Smith and Waterman, Adv. Appl. Math., 1981, 2:482), by the homology alignment algorithm of Needleman and Wunsch (Needleman and Wunsch, J. Mol. Biol., 1970, 48:443), by the search for similarity method of Pearson and Lipman (Pearson and Lipman, Proc. Natl. Acad. Sci. USA, 1988, 85:2444), by computerized implementations of these algorithms (e.g., GAP, BESTFIT, FASTA, and TFASTA in the GCG Wisconsin Software Package), or by visual inspection, as known in the art. Examples of algorithms that are suitable for determining percent sequence identity and sequence similarity include, but are not limited to the BLAST and BLAST 2.0 algorithms (See e.g., Altschul et al., J. Mol. Biol., 1990, 215:403-410; and Altschul et al., Nucleic Acids Res., 1977, 3389-3402). Software for performing BLAST analyses is publicly available through the National Center for Biotechnology Information website. This algorithm involves first identifying high scoring sequence pairs (HSPs) by identifying short words of length “W” in the query sequence, which either match or satisfy some positive-valued threshold score “T,” when aligned with a word of the same length in a database sequence. T is referred to as the neighborhood word score threshold (See, Altschul et al, supra). These initial neighborhood word hits act as seeds for initiating searches to find longer HSPs containing them. The word hits are then extended in both directions along each sequence for as far as the cumulative alignment score can be increased. Cumulative scores are calculated using, for nucleotide sequences, the parameters “M” (reward score for a pair of matching residues; always >0) and “N” (penalty score for mismatching residues; always <0). For amino acid sequences, a scoring matrix is used to calculate the cumulative score. Extension of the word hits in each direction are halted when: the cumulative alignment score falls off by the quantity “X” from its maximum achieved value; the cumulative score goes to zero or below, due to the accumulation of one or more negative-scoring residue alignments; or the end of either sequence is reached. The BLAST algorithm parameters W, T, and X determine the sensitivity and speed of the alignment. The BLASTN program (for nucleotide sequences) uses as defaults a wordlength (W) of 11, an expectation (E) of 10, M=5, N=-4, and a comparison of both strands. For amino acid sequences, the BLASTP program uses as defaults a wordlength (W) of 3, an expectation (E) of 10, and the BLOSUM62 scoring matrix (See e.g., Henikoff and Henikoff, Proc. Natl. Acad. Sci. USA, 1989, 89:10915). Exemplary determination of sequence alignment and % sequence identity can employ the BESTFIT or GAP programs in the GCG Wisconsin Software package (Accelrys, Madison Wis.), using default parameters provided.

[0082] As used herein, “reference sequence” refers to a defined sequence used as a basis for a sequence comparison. A reference sequence may be a subset of a larger sequence, for example, a segment of a full-length gene or polypeptide sequence. Generally, a reference sequence is at least 20 nucleotide or amino acid residues in length, at least 25 residues in length, at least 50 residues in length, at least 100 residues in length or the full length of the nucleic acid or polypeptide. Since two polynucleotides or polypeptides may each (1) comprise a sequence (i.e., a portion of the complete sequence) that is similar between the two sequences, and (2) may further comprise a sequence that is divergent between the two sequences, sequence comparisons between two (or more) polynucleotides or polypeptide are typically performed by comparing sequences of the two polynucleotides or polypeptides over a “comparison window” to identify and compare local regions of sequence similarity. In some embodiments, a “reference sequence” can be based on a primary amino acid sequence, where the reference sequence is a sequence that can have one or more changes in the primary sequence. For instance, the phrase “a reference sequence based on SEQ ID NO: 2, having a glycine at the residue corresponding to X49” (or “a reference sequence based on SEQ ID NO: 2, having a glycine at the residue corresponding to position 49”) refers to a reference sequence in which the corresponding residue at position X49 in SEQ ID NO: 2 (e.g., an alanine), has been changed to glycine.

[0083] As used herein, “comparison window” refers to a conceptual segment of at least about 20 contiguous nucleotide positions or amino acids residues wherein a sequence may be compared to a reference sequence of at least 20 contiguous nucleotides or amino acids and wherein the portion of the sequence in the comparison window may comprise additions or deletions (i.e., gaps) of 20 percent or less as compared to the reference sequence (which does not comprise additions or deletions) for optimal alignment of the two sequences. The comparison window can be longer than 20 contiguous residues, and includes, optionally 30, 40, 50, 100, or longer windows.

[0084] As used herein, “corresponding to”, “reference to,” and “relative to” when used in the context of the numbering of a given amino acid or polynucleotide sequence refer to the numbering of the residues of a specified reference sequence when the given amino acid or polynucleotide sequence is compared to the reference sequence. In other words, the residue number or residue position of a given polymer is designated with respect to the reference sequence rather than by the actual numerical position of the residue within the given amino acid or polynucleotide sequence. For example, a given amino acid sequence, such as that of a recombinant reverse transcriptase, can be aligned to a reference sequence by introducing gaps to optimize residue matches between the two sequences. In these cases, although the gaps are present, the numbering of the residue in the given amino acid or polynucleotide sequence is made with respect to the reference sequence to which it has been aligned. In some embodiments, the sequence is tagged (e.g., with a histidine tag).

[0085] As used herein, “mutation” refers to the alteration of a nucleic acid sequence. In some embodiments, mutations result in changes to the encoded polypeptide sequence (i.e., as compared to the original sequence without the mutation). In some embodiments, the mutation comprises a substitution, such that a different amino acid is produced (e.g., substitution of an aspartic acid with tryptophan). In some alternative embodiments, the mutation comprises an addition, such that an amino acid is added to the original polypeptide sequence. In some further embodiments, the mutation comprises a deletion, such that an amino acid is deleted from the original polypeptide sequence. Any number of mutations may be present in a given sequence.

[0086] As used herein, “amino acid difference” and “residue difference” refer to a difference in the amino acid residue at a position of a polypeptide sequence relative to the amino acid residue at a corresponding position in a reference sequence. The positions of amino acid differences generally are referred to herein as “Xn,” where n refers to the corresponding position in the reference sequence upon which the residue difference is based. For example, a “residue difference at position X18 as compared to SEQ ID NO: 2” (or a “residue difference at position 18 as compared to SEQ ID NO: 2”) refers to a difference of the amino acid residue at the polypeptide position corresponding to position 18 of SEQ ID NO: 2. Thus, if the reference polypeptide of SEQ ID NO: 2 has an aspartic acid at position 18, then a “residue difference at position X18 as compared to SEQ ID NO: 2” refers to an amino acid substitution of any residue other than aspartic acid at the position of the polypeptide corresponding to position 18 of SEQ ID NO: 2. In some instances herein, the specific amino acid residue difference at a position is indicated as “XnY” where “Xn” specified the corresponding residue and position of the reference polypeptide (as described above), and “Y” is the single letter identifier of the amino acid found in the engineered polypeptide (i.e., the different residue than in the reference polypeptide). In some instances (e.g., in the Tables in the Examples), the present disclosure also provides specific amino acid differences denoted by the conventional notation “AnB”, where A is the single letter identifier of the residue in the reference sequence, “n” is the number of the residue position in the reference sequence, and B is the single letter identifier of the residue substitution in the sequence of the engineered polypeptide. In some instances, a polypeptide of the present disclosure can include one or more amino acid residue differences relative to a reference sequence, which is indicated by a list of the specified positions where residue differences are present relative to the reference sequence. In some embodiments, where more than one amino acid can be used in a specific residue position of a polypeptide, the various amino acid residues that can be used are separated by a “/” (e.g., X447G/X447L, X447G/L, or I447G/L or 447G/L). The present disclosure includes engineered polypeptide sequences comprising one or more amino acid differences that include either/or both conservative and non-conservative amino acid substitutions, as well as insertions and deletions of amino acids in the sequence.

[0087] As used herein, the terms “amino acid substitution set” and “substitution set” refers to a group of amino acid substitutions within a polypeptide sequence. In some embodiments, substitution sets comprise 1, 2, 3, 4, 5, 6, 7, 8, 9, 10, 11, 12, 13, 14, 15, or more amino acid substitutions. In some embodiments, a substitution set refers to the set of amino acid substitutions that is present in any of the variant Reverse transcriptase polypeptides listed in any of the Tables in the Examples. In these substitution sets, the individual substitutions are separated by a semicolon (“;”; e.g., R114K; I210L; T307K) or slash (“/”; e.g., R114K/I210L/T307K or 114K/210L/307K). In some embodiments, the “substitution” comprises the deletion of an amino acid.

[0088] As used herein, “conservative amino acid substitution” refers to a substitution of a residue with a different residue having a similar side chain, and thus typically involves substitution of the amino acid in the polypeptide with amino acids within the same or similar defined class of amino acids. By way of example and not limitation, an amino acid with an aliphatic side chain may be substituted with another aliphatic amino acid (e.g., alanine, valine, leucine, and isoleucine); an amino acid with hydroxyl side chain is substituted with another amino acid with a hydroxyl side chain (e.g., serine and threonine); an amino acids having aromatic side chains is substituted with another amino acid having an aromatic side chain (e.g., phenylalanine, tyrosine, tryptophan, and histidine); an amino acid with a basic side chain is substituted with another amino acid with a basis side chain (e.g., lysine and arginine); an amino acid with an acidic side chain is substituted with another amino acid with an acidic side chain (e.g., aspartic acid or glutamic acid); and a hydrophobic or hydrophilic amino acid is replaced with another hydrophobic or hydrophilic amino acid, respectively.

[0089] As used herein, “non-conservative substitution” refers to substitution of an amino acid in the polypeptide with an amino acid with significantly differing side chain properties. Non-conservative substitutions may use amino acids between, rather than within, the defined groups and affect: (a) the structure of the peptide backbone in the area of the substitution (e.g., proline for glycine); (b) the charge or hydrophobicity; and/or (c) the bulk of the side chain. By way of example and not limitation, exemplary non-conservative substitutions include an acidic amino acid substituted with a basic or aliphatic amino acid; an aromatic amino acid substituted with a small amino acid; and a hydrophilic amino acid substituted with a hydrophobic amino acid.

[0090] As used herein, “deletion” refers to modification to the polypeptide by removal of one or more amino acids from the reference polypeptide. Deletions can comprise removal of 1 or more amino acids, 2 or more amino acids, 5 or more amino acids, 10 or more amino acids, 15 or more amino acids, or 20 or more amino acids, up to 10% of the total number of amino acids, or up to 20% of the total number of amino acids making up the reference enzyme while retaining enzymatic activity and/or retaining the improved properties of an engineered polymerase enzyme. Deletions can be directed to the internal portions and/or terminal portions of the polypeptide. In various embodiments, the deletion can comprise a continuous segment or can be discontinuous. Deletions are indicated by “-”, and may be present in substitution sets.

[0091] As used herein, “insertion” refers to modification to the polypeptide by addition of one or more amino acids from the reference polypeptide. Insertions can be in the internal portions of the polypeptide, or to the carboxy or amino terminus. Insertions as used herein include fusion proteins as is known in the art. The insertion can be a contiguous segment of amino acids or separated by one or more of the amino acids in the naturally occurring polypeptide.

[0092] As used herein, “functional fragment” and “biologically active fragment” are used interchangeably herein, to refer to a polypeptide that has an amino-terminal and/or carboxy-terminal deletion(s) and/or internal deletions, but where the remaining amino acid sequence is identical to the corresponding positions in the sequence to which it is being compared (e.g., a full length engineered reverse transcriptase of the present invention) and that retains substantially all of the activity of the full-length polypeptide.

[0093] As used herein, “isolated polypeptide” refers to a polypeptide which is substantially separated from other contaminants that naturally accompany it (e.g., protein, lipids, and polynucleotides). The term embraces polypeptides which have been removed or purified from their naturally-occurring environment or expression system (e.g., host cell or in vitro synthesis). The recombinant reverse transcriptase polypeptides may be present within a cell, present in the cellular medium, or prepared in various forms, such as lysates or isolated preparations. As such, in some embodiments, the recombinant reverse polymerase polypeptides provided herein are isolated polypeptides.

[0094] As used herein, “substantially pure polypeptide” refers to a composition in which the polypeptide species is the predominant species present (i.e., on a molar or weight basis it is more abundant than any other individual macromolecular species in the composition), and is generally a substantially purified composition when the object species comprises at least about 50 percent of the macromolecular species present by mole or % weight. Generally, a substantially pure DNA polymerase composition will comprise about 60% or more, about 70% or more, about 80% or more, about 90% or more, about 95% or more, and about 98% or more of all macromolecular species by mole or % weight present in the composition. In some embodiments, the object species is purified to essential homogeneity (i.e., contaminant species cannot be detected in the composition by conventional detection methods) wherein the composition consists essentially of a single macromolecular species. Solvent species, small molecules (<500 Daltons), and elemental ion species are not considered macromolecular species. In some embodiments, the isolated recombinant reverse transcriptase polypeptides are substantially pure polypeptide compositions.

[0095] As used herein, “improved enzyme property” refers to a recombinant reverse transcriptase polypeptide that exhibits an improvement in any enzyme property as compared to a reference reverse transcriptase polypeptide, such as a wild-type reverse transcriptase polypeptide (e.g., the reverse transcriptase of SEQ ID NO: 2) or another reference recombinant reverse transcriptase polypeptide. Improved properties include but are not limited to such properties as increased protein expression, increased thermoactivity, increased thermostability, increased salt tolerance, increased stability, increased enzymatic activity, increased substrate specificity and/or affinity, increased specific activity, increased resistance to substrate and/or end-product inhibition, increased chemical stability, improved solvent stability, increased tolerance to acidic pH, increased tolerance to proteolytic activity (i.e., reduced sensitivity to proteolysis), increased solubility, increased processivity, increased fidelity, and altered temperature profile.

[0096] As used herein, “increased enzymatic activity” and “enhanced catalytic activity” refer to an improved property of the recombinant reverse transcriptase polypeptides, which can be represented by an increase in specific activity (e.g., product produced/time/weight protein) and/or an increase in percent conversion of the substrate to the product (e.g., percent conversion of starting amount of substrate to product in a specified time period using a specified amount of reverse transcriptase) as compared to the reference reverse transcriptase enzyme (e.g., wild-type reverse transcriptase and/or another recombinant reverse transcriptase). Exemplary methods to determine enzyme activity are provided in the Examples. Any property relating to enzyme activity may be affected, including the classical enzyme properties of Kₘ, Vₘₐₓ or k_{cat}, changes of which can lead to increased enzymatic activity. Improvements in enzyme activity can be from about 1.1 fold the enzymatic activity of the corresponding wild-type enzyme, to as much as 2-fold, 5-fold, 10-fold, 20-fold, 25-fold, 50-fold, 75-fold, 100-fold, 150-fold, 200-fold or more enzymatic activity than the naturally occurring reverse transcriptase or another recombinant reverse transcriptase from which the reverse transcriptase polypeptides were derived.

[0097] As used herein, “conversion” refers to the enzymatic conversion (or biotransformation) of substrate(s) to the corresponding product(s). “Percent conversion” refers to the percent of the substrate that is converted to the product within a period of time under specified conditions. Thus, the “enzymatic activity” or “activity” of a reverse transcriptase polypeptide can be expressed as “percent conversion” of the substrate to the product in a specific period of time. In some embodiments, in context of a polymerase “conversion” can relate to the amount of nucleotide substrate incorporated into a DNA polymer.

[0098] As used herein, “hybridization stringency” relates to hybridization conditions, such as washing conditions, in the hybridization of nucleic acids. Generally, hybridization reactions are performed under conditions of lower stringency, followed by washes of varying but higher stringency. The term “moderately stringent hybridization” refers to conditions that permit target-DNA to bind a complementary nucleic acid that has about 60% identity, preferably about 75% identity, about 85% identity to the target DNA, with greater than about 90% identity to target-polynucleotide. Exemplary moderately stringent conditions are conditions equivalent to hybridization in 50% formamide, 5× Denhart's solution, 5×SSPE, 0.2% SDS at 42° C., followed by washing in 0.2×SSPE, 0.2% SDS, at 42° C. “High stringency hybridization” refers generally to conditions that are about 10° C. or less from the thermal melting temperature Tₘ as determined under the solution condition for a defined polynucleotide sequence. In some embodiments, a high stringency condition refers to conditions that permit hybridization of only those nucleic acid sequences that form stable hybrids in 0.018M NaCl at 65° C. (i.e., if a hybrid is not stable in 0.018M NaCl at 65° C., it will not be stable under high stringency conditions, as contemplated herein). High stringency conditions can be provided, for example, by hybridization in conditions equivalent to 50% formamide, 5× Denhart's solution, 5× SSPE, 0.2% SDS at 42° C., followed by washing in 0.1× SSPE, and 0.1% SDS at 65° C. Another high stringency condition comprises hybridizing in conditions equivalent to hybridizing in 5× SSC containing 0.1% (w:v) SDS at 65° C. and washing in 0.1× SSC containing 0.1% SDS at 65° C. Other high stringency hybridization conditions, as well as moderately stringent conditions, are described in the references cited above.

[0099] As used herein, “codon optimized” refers to changes in the codons of the polynucleotide encoding a protein to those preferentially used in a particular organism such that the encoded protein is more efficiently expressed in that organism. Although the genetic code is degenerate, in that most amino acids are represented by several codons, called “synonyms” or “synonymous” codons, it is well known that codon usage by particular organisms is nonrandom and biased towards particular codon triplets. This codon usage bias may be higher in reference to a given gene, genes of common function or ancestral origin, highly expressed proteins versus low copy number proteins, and the aggregate protein coding regions of an organism's genome. In some embodiments, the polynucleotides encoding the DNA polymerase enzymes are codon optimized for optimal production from the host organism selected for expression.

[0100] As used herein, “control sequence” refers herein to include all components that are necessary or advantageous for the expression of a polynucleotide and/or polypeptide of the present disclosure. Each control sequence may be native or foreign to the nucleic acid sequence encoding the polypeptide. Such control sequences include, but are not limited to, leaders, polyadenylation sequences, propeptide sequences, promoter sequences, signal peptide sequences, initiation sequences, and transcription terminators. At a minimum, the control sequences include a promoter, and transcriptional and translational stop signals. In some embodiments, the control sequences are provided with linkers for the purpose of introducing specific restriction sites facilitating ligation of the control sequences with the coding region of the nucleic acid sequence encoding a polypeptide.

[0101] As used herein, “operably linked” is defined herein as a configuration in which a control sequence is appropriately placed (i.e., in a functional relationship) at a position relative to a polynucleotide of interest such that the control sequence directs or regulates the expression of the polynucleotide encoding a polypeptide of interest.

[0102] As used herein, “promoter sequence” refers to a nucleic acid sequence that is recognized by a host cell for expression of a polynucleotide of interest, such as a coding sequence. The promoter sequence contains transcriptional control sequences that mediate the expression of a polynucleotide of interest. The promoter may be any nucleic acid sequence which shows transcriptional activity in the host cell of choice including mutant, truncated, and hybrid promoters, and may be obtained from genes encoding extracellular or intracellular polypeptides either homologous or heterologous to the host cell.

[0103] As used herein, “substrate” in context of reverse transcriptase refers to any substrate used by reverse transcriptase in producing a DNA from a template, either RNA or DNA. In some embodiments, the substrate comprises nucleotides, e.g., nucleotide triphosphates, including non-naturally occurring nucleotides, used by reverse transcriptase. In some embodiments, the substrate is a polynucleotide/oligonucleotide primer, where the primer is used by the reverse transcriptase in initiation polymerization.

[0104] As used herein, “target RNA” refers to an RNA that is the RNA of interest to act as a template for a reverse transcriptase. Exemplary “target RNA” includes, without limitation, mRNA, ribosomal RNA (rRNA), micro RNA (miRNA), small nuclear RNA (snRNA), non-coding RNA, cell-free RNA (cfRNA), viral RNA, bacterial RNA, yeast RNA, and iRNA. The “target” refers to all or a portion of the RNA.

[0105] As used herein, “suitable reaction conditions” or “suitable conditions” refers to those conditions in the enzymatic conversion reaction solution (e.g., ranges of enzyme loading, substrate loading, temperature, pH, buffers, co-solvents, etc.) under which a reverse transcriptase polypeptide of the present disclosure is capable of converting a substrate to the desired product compound. Exemplary “suitable reaction conditions” are provided herein (see, the Examples).

[0106] As used herein, “loading”, such as in “compound loading” or “enzyme loading” refers to the concentration or amount of a component in a reaction mixture at the start of the reaction. “Substrate” in the context of an enzymatic conversion reaction process refers to the compound or molecule acted on by the reverse transcriptase polypeptide.

[0107] As used herein, “product” in the context of an enzymatic conversion process refers to the compound or molecule resulting from the action of the reverse transcriptase polypeptide on a template, e.g., RNA template.

[0108] As used herein, “culturing” refers to the growing of a population of microbial cells under suitable conditions using any suitable medium (e.g., liquid, gel, or solid).

[0109] Recombinant polypeptides (e.g., reverse transcriptase variants) can be produced using any suitable methods known the art. For example, there is a wide variety of different mutagenesis techniques well known to those skilled in the art. In addition, mutagenesis kits are also available from many commercial molecular biology suppliers. Methods are available to make specific substitutions at defined amino acids (site-directed), specific or random mutations in a localized region of the gene (regio-specific), or random mutagenesis over the entire gene (e.g., saturation mutagenesis). Numerous suitable methods are known to those in the art to generate enzyme variants, including but not limited to site-directed mutagenesis of single-stranded DNA or double-stranded DNA using PCR, cassette mutagenesis, gene synthesis, error-prone PCR, shuffling, and chemical saturation mutagenesis, or any other suitable method known in the art. Non-limiting examples of methods used for DNA and protein engineering are provided in the following patents: US Pat. Nos. 6,117,679; 6,420,175; 6,376,246; 6,586,182; 7,747,391; 7,747,393; 7,783,428; and 8,383,346. After the variants are produced, they can be screened for any desired property (e.g., high or increased activity, or low or reduced activity, increased thermal activity, increased thermal stability, increased fidelity, increased processivity, and/or pH stability, etc.). In some embodiments, “recombinant reverse transcriptase polypeptides” (also referred to herein as “recombinant reverse transcriptase polypeptides,” “recombinant reverse transcriptases,” “variant DNA polymerase enzymes,” and “DNA polymerase variants”) find use in diagnostics and molecular biological tools.

[0110] As used herein, a “vector” is a DNA construct for introducing a DNA sequence into a cell. In some embodiments, the vector is an expression vector that is operably linked to a suitable control sequence capable of effecting the expression in a suitable host of the polypeptide encoded in the DNA sequence. In some embodiments, an “expression vector” has a promoter sequence operably linked to the DNA sequence (e.g., transgene) to drive expression in a host cell, and in some embodiments, also comprises a transcription terminator sequence.

[0111] As used herein, the term “expression” includes any step involved in the production of the polypeptide including, but not limited to, transcription, post-transcriptional modification, translation, and post-translational modification. In some embodiments, the term also encompasses secretion of the polypeptide from a cell.

[0112] As used herein, the term “produces” refers to the production of proteins and/or other compounds by cells. It is intended that the term encompass any step involved in the production of polypeptides including, but not limited to, transcription, post-transcriptional modification, translation, and post-translational modification. In some embodiments, the term also encompasses secretion of the polypeptide from a cell.

[0113] As used herein, an amino acid or nucleotide sequence (e.g., a promoter sequence, signal peptide, terminator sequence, etc.) is “heterologous” to another sequence with which it is operably linked if the two sequences are not associated in nature.

[0114] As used herein, the terms “host cell” and “host strain” refer to suitable hosts for expression vectors comprising DNA provided herein (e.g., a polynucleotide sequences encoding at least one DNA polymerase variant). In some embodiments, the host cells are prokaryotic or eukaryotic cells that have been transformed or transfected with vectors constructed using recombinant DNA techniques as known in the art.

[0115] As used herein, the term “analogue” means a polypeptide having more than 70% sequence identity but less than 100% sequence identity (e.g., more than 75%, 78%, 80%, 83%, 85%, 88%, 90%, 91%, 92%, 93%, 94%, 95%, 96%, 97%, 98%, 99% sequence identity) with a reference polypeptide. In some embodiments, analogues include non-naturally occurring amino acid residues including, but not limited, to homoarginine, ornithine and norvaline, as well as naturally occurring amino acids. In some embodiments, analogues also include one or more D-amino acid residues and non-peptide linkages between two or more amino acid residues.

[0116] As used herein, the term “effective amount” means an amount sufficient to produce the desired result. One of general skill in the art may determine what the effective amount by using routine experimentation.

[0117] The terms “isolated” and “purified” are used to refer to a molecule (e.g., an isolated nucleic acid, polypeptide, etc.) or other component that is removed from at least one other component with which it is naturally associated. The term “purified” does not require absolute purity, rather it is intended as a relative definition.

[0118] As used herein, “cell-free RNA” or “cfRNA” refers to RNA circulating freely in the bloodstream and is not contained by or associated with cells. In some embodiments, cell-free RNA comprises RNA originally derived and released from normal somatic or germ line cells, cancer cells, fetal cells, microbial cells, or viruses.

[0119] As used herein, “amplification” refers to nucleic acid replication. In some embodiments, the term refers to replication of specific template nucleic acid.

[0120] As used herein, “polymerase chain reaction” and “PCR” refer to the methods described in U.S. Pat. Nos. 4,683,195 and 4,6884,202, hereby incorporated by reference. These methods find use in increasing the concentration of a segment of a target sequence or an entire target sequence in a mixture or purified DNA, without cloning or purification being required. The sequence of denaturation, annealing and extension constitute a “cycle.” The steps of denaturing, primer annealing, and polymerase extension can be repeated many times (i.e., multiple cycles are used), to obtain a high concentration of amplified DNA. The process is well-known in the art and numerous variations have been developed over the years since the method was first described. With PCR, it is possible to amplify a single copy of a specific target sequence to a level that is detectable by several different methodologies, including but not limited to hybridization with a labeled probe, incorporation of biotinylated primers followed by avidin-enzyme conjugate detection, incorporation of ³²P-labeled deoxyribonucleotide triphosphates (e.g., dCTP or dATP) into the amplified segment, etc. In addition to genomic DNA, any oligonucleotide sequence amenable to amplification can be copies using PCR with an appropriate set of primers. PCR products can also serve as templates for amplification.

[0121] As used herein, “target” in context of methods of using a DNA polymerase refers to the region of nucleic acid bounded by the primers used in the method. The “target” is sorted out from other nucleic acids present in the sample used the method. In some embodiments, a “segment” is a region of nucleic acid within the target sequence.

[0122] As used herein, “target RNA” when used in context of a reverse transcriptase refers to the RNA, all or a portion thereof, that is the object for preparation of a complementary DNA copy. As noted, the target RNA can be the whole of the RNA sequence or a portion thereof, such as a segment of the RNA sequence.

[0123] As used herein, “sample template” refers to nucleic acid originating from a sample which is analyzed for the presence of target nucleic acid. In contrast, “background template” refers to nucleic acid other than sample template that may or may not be present within a sample. Background template may be inadvertently included in the sample, it may result from carryover, or may be due to the presence of nucleic acid contaminants from which the target nucleic acid is purified. For example, in some embodiments, nucleic acids from organisms other than those to be detected may be present as background in a test sample. However, it is not intended that the present invention be limited to any specific nucleic acid samples or templates.

[0124] As used herein, “amplifiable nucleic acid” is used in reference to nucleic acids which may be amplified by any amplification method, including but not limited to PCR. In most embodiments, amplifiable nucleic acids comprise sample templates.

[0125] As used herein, “PCR product”, “PCR fragment,” and “amplification product” refer to the resultant compounds obtained after two or more cycles of PCR amplification (or other amplification method, as indicated by the context), typically comprising the steps of denaturation, annealing, and extension. The terms encompass the situation wherein there has been amplification of one or more segments of one or more target sequences.

[0126] As used herein, “amplification reagents” and “PCR reagents” refer to those reagents (e.g., deoxyribonucleotide triphosphates, buffer, etc.), needed for amplification except for the primers, nucleic acid template, and the amplification enzyme. Typically, amplification reagents, along with other reaction components are placed and contained in a reaction vessel (e.g., test tube, microwell, etc.). It is not intended that the present invention be limited to any specific amplification reagents, as any suitable reagents find use in the present invention.

[0127] As used herein, “primer” refers to an oligonucleotide or polynucleotide (i.e., a sequence of nucleotides), whether occurring naturally or produced synthetically, recombinantly, or by amplification, which is capable of acting as a point of initiation of nucleic acid synthesis, when placed under conditions in which synthesis of a primer extension product that is complementary to a nucleic acid strand is induced (i.e., in the presence of nucleotides and an inducing agent such as reverse transcriptase, and at a suitable temperature and pH). In most embodiments, primers are single-stranded, but in some embodiments, they are double-stranded. In some embodiments, the primers are of sufficient length to prime the synthesis of extension products in the presence of a reverse transcriptase or DNA polymerase. The exact primer length depends upon many factors, as known to those skilled in the art. In some embodiments, the primers can be sequence specific primers or random primers.

[0128] As used herein, “probe” refers to an oligonucleotide (i.e., a sequence of nucleotides), whether occurring naturally or produced synthetically, recombinantly, or by amplification, which is capable of hybridizing to another oligonucleotide of interest. Probes find use in the detection, identification, and/or isolation of particular gene sequences of interest. In some embodiments, probes are labeled with a “reporter molecule” (also referred to as a “label”) that aids in the detection of the probe in a suitable detection system (e.g., fluorescent, radioactive, luminescent, enzymatic, and other systems). It is not intended that the present invention be limited to any particular detection system or label. Primers, deoxyribonucleotides, and deoxyribonucleosides may contain labels. Indeed, it is not intended that the labeled composition of the present invention be limited to any particular component. Illustrative labels include, but are not limited to ³²P, ³⁵S, and fluorescent molecules (e.g., fluorescent dyes, including but not limited to green fluorescent protein).

[0129] As used herein, “fidelity,” when used in reference to a polymerase, including a reverse transcriptase, is intended to refer to the accuracy of template-directed incorporation of complementary bases in a synthesized DNA strand relative to the template strand. Typically, fidelity is measured based on the frequency of incorporation of incorrect bases in the newly synthesized nucleic acid strand. The incorporation of incorrect bases can result in point mutations, insertions, or deletions. Fidelity can be calculated according to any method known in the art (See e.g., Tindall and Kunkel, Biochem., 1988, 27:6008-6013; and Barnes, Gene, 1992, 112:29-35). A reverse transcriptase, polymerase or variants thereof can exhibit either high fidelity or low fidelity. As used herein, “high fidelity” refers to polymerases with a frequency of accurate base incorporation that exceeds a predetermined value. As used herein, the term “low fidelity” refers to polymerases with a frequency of accurate base incorporation that is lower than a predetermined value. In some embodiments, the predetermined value is a desired frequency of accurate base incorporation or the fidelity of a known reverse transcriptase or polymerase (i.e., a reference reverse transcriptase or polymerase).

[0130] As used herein, “altered fidelity” refers to the fidelity of a reverse transcriptase, polymerase, or variants thereof that differ from the fidelity of the parent reverse transcriptase or polymerase from which the variant was derived. In some embodiments, the altered fidelity is higher than the fidelity of the parent enzyme, while in some other embodiments, the altered fidelity is lower than the fidelity of the parent enzyme. Altered fidelity can be determined by assaying the parent and variant enzymes and comparing their activities using any suitable assay known in the art.

[0131] As used herein, the term “processivity” refers to the ability of a nucleic acid modifying enzyme, such as a DNA polymerase, to remain bound to the template or substrate and perform multiple modification reactions. Processivity is generally measured by the number of catalytic events that take place per binding event.

[0132] As used herein, “altered processivity” refers to the processivity of polymerase, or variants thereof that differ from the processivity of the parent polymerase from which the variant was derived. In some embodiments, the altered processivity is higher than the processivity of the parent enzyme, while in some other embodiments, the altered processivity is lower than the processivity of the parent enzyme. Altered processivity can be determined by assaying the parent and variant enzymes and comparing their activities using any suitable assay known in the art.

[0133] As used herein, the term “subject” encompasses mammals such as humans, non-human primates, livestock, companion animals, and laboratory animals (e.g., rodents and lagamorphs). It is intended that the term encompass females as well as males. As used herein, the term “patient” means any subject that is being assessed for, treated for, or is experiencing disease.

[0134] As used herein, the term “sample” refers to a material or substance for reaction with a reverse transcriptase, for example, such as for detecting presence of a target RNA or preparing a cDNA copy of a target RNA for sequencing or generation of cDNA libraries. In some embodiments, the sample is a “biological sample,” which refers to sample of biological tissue or fluid. Such samples are typically from humans, but include tissues isolated from non-human primates, or rodents, e.g., mice, and rats, and includes sections of tissues such as biopsy and autopsy samples, frozen sections taken for histological purposes, blood, plasma, serum, sputum, stool, tears, mucus, hair, skin, etc. A “biological sample” also refers to a cell or population of cells or a quantity of tissue or fluid from organisms. In some embodiments, the biological sample has been removed from an animal, but the term “biological sample” can also refer to cells or tissue analyzed in vivo, i.e., without removal from the animal. Typically, a “biological sample” will contain cells from the animal or of organisms, but the term can also refer to noncellular biological material, such as noncellular fractions of blood, saliva, or urine. Numerous types of biological samples can be used with the enzymes, compositions, and method in the present disclosure, including, but not limited to, a tissue biopsy, a blood sample, a buccal scrape, a saliva sample, or a nipple discharge. As used herein, a “tissue biopsy” refers to an amount of tissue removed from an animal, preferably a human, for diagnostic analysis. In a patient with cancer, tissue may be removed from a tumor, allowing the analysis of cells within the tumor. “Tissue biopsy” can refer to any type of biopsy, such as needle biopsy, fine needle biopsy, surgical biopsy, etc.

### Recombinant Reverse Transcriptase Polypeptides

[0135] The present disclosure provides recombinant or engineered reverse transcriptase variants having one or more improved properties. In some embodiments, the recombinant reverse transcriptase polypeptide variants are useful in performing polymerase reactions, including preparing a complementary DNA of an RNA target/template, whole or in part. The recombinant reverse transcriptase variants of the present disclosure find use in the efficient creation of DNA libraries from RNA templates, such as for generating cDNA libraries; sequencing; and diagnostic methods, such as for detecting a target RNA. The reverse transcriptase variants of the disclosure can be used in solution, as well as in immobilized embodiments. In some embodiments, the recombinant reverse transcriptase can prepared and used as non-fusion polypeptides or as fusion polypeptides.

[0136] In some embodiments herein, when a particular reverse transcriptase variant (i.e., a recombinant reverse transcriptase polypeptide) is referred to by reference to modification of particular amino acid residues in the sequence of a wild-type reverse transcriptase or reference reverse transcriptase polypeptide, it is to be understood that variants of another reverse transcriptase modified in the equivalent position(s) (as determined from the optional amino acid sequence alignment between the respective amino acid sequences) are encompassed herein. For example, for a substitution at specified amino acid position(s) numbered in reference to SEQ ID: 2, an equivalent amino acid position(s) can be readily ascertained for another reference sequence, such as a reference sequence comprising residues 12 to 687 of SEQ ID NO: 2, 24, 94 or 354, or such as a reference sequence of SEQ ID NO: 24, 94 or 354.

[0137] In one aspect, the present disclosure provides a recombinant (engineered) reverse transcriptase, or a functional fragment thereof, comprising a polypeptide sequence having at least 70%, 75%, 80%, 81%, 82%, 83%, 84%, 85%, 86%, 87%, 88%, 89%, 90%, 91%, 92%, 93%, 94%, 95%, 96%, 97%, 98%, 99%, or more sequence identity to a reference sequence corresponding to residues 12 to 687 of SEQ ID NO: 2, 24, 94, or 352, or to a reference sequence corresponding to SEQ ID NO: 2, 24, 94, or 352, wherein the polypeptide sequence comprises one or more substitutions relative to the reference sequence corresponding to residues 12 to 687 of SEQ ID NO: 2, 24, 94, or 352, or to the reference sequence corresponding to SEQ ID NO: 2, 24, 94, or 352.

[0138] In some embodiments, a recombinant reverse transcriptase, or functional fragment thereof, comprises a polypeptide sequence having at least 70%, 75%, 80%, 81%, 82%, 83%, 84%, 85%, 86%, 87%, 88%, 89%, 90%, 91%, 92%, 93%, 94%, 95%, 96%, 97%, 98%, 99%, or more sequence identity to the reference sequence corresponding to residues 12 to 687 of SEQ ID NO: 2, or to the reference sequence corresponding to SEQ ID NO: 2, wherein the polypeptide sequence comprises one or more substitutions relative to the reference sequence corresponding to residues 12 to 687 of SEQ ID NO: 2, or to the reference sequence corresponding to SEQ ID NO: 2.

[0139] In some embodiments, the recombinant reverse transcriptase, or a functional fragment thereof, comprises a polypeptide sequence having at least 80% or more sequence identity to the reference sequence corresponding to residues 12 to 687 of SEQ ID NO: 2, or to the reference sequence corresponding to SEQ ID NO: 2, wherein the polypeptide sequence comprises one or more substitutions relative to the reference sequence corresponding to residues 12 to 687 of SEQ ID NO: 2, or to the reference sequence corresponding to SEQ ID NO: 2.

[0140] In some embodiments, a recombinant reverse transcriptase, or a functional fragment thereof, comprises a polypeptide sequence having at least 70%, 75%, 80%, 81%, 82%, 83%, 84%, 85%, 86%, 87%, 88%, 89%, 90%, 91%, 92%, 93%, 94%, 95%, 96%, 97%, 98%, 99%, or more sequence identity to a reference sequence corresponding to residues 12 to 687 of SEQ ID NO: 24, 94, or 352, or to a reference sequence corresponding to SEQ ID NO: 24, 94, or 352, wherein the polypeptide sequence comprises one or more substitutions relative to the reference sequence corresponding to residues 12 to 687 of SEQ ID NO: 2, or to the reference sequence corresponding to SEQ ID NO: 2.

[0141] In some embodiments, the recombinant reverse transcriptase, or a functional fragment thereof, comprises a polypeptide sequence having at least 70%, 75%, 80%, 81%, 82%, 83%, 84%, 85%, 86%, 87%, 88%, 89%, 90%, 91%, 92%, 93%, 94%, 95%, 96%, 97%, 98%, 99%, or more sequence identity to a reference sequence corresponding to residues 12 to 687 of a recombinant reverse transcriptase variant set forth in Table 4.1, 5.1, 6.1, and 7.1, or to a reference sequence corresponding to a recombinant reverse transcriptase variant set forth in Table 4.1, 5.1, 6.1, and 7.1, wherein the polypeptide sequence comprises one or more substitutions relative to the reference sequence corresponding to residues 12 to 687 of SEQ ID NO: 2, or to the reference sequence corresponding to SEQ ID NO: 2.

[0142] In some embodiments, the polypeptide sequence of the recombinant reverse transcriptase comprises at least a substitution at amino acid position 18, 25, 49, 63, 68, 69, 72, 74, 78, 81, 83, 84, 85, 89, 90, 92, 94, 98, 102, 113, 114, 118, 119, 129, 130, 132, 134, 163, 167, 171, 173, 178, 196, 199, 205, 209, 210, 212, 216, 242, 258, 260, 261, 266, 294, 297, 298, 300, 303, 305, 307, 308, 309, 310, 311, 314, 317, 319, 321, 329, 331, 333, 338, 342, 343, 349, 356, 370, 403, 444, 447, 454, 464, 465, 466, 474, 479, 508, 509, 519, 536, 537, 554, 574, 576, 583, 595, 598, 606, 638, 639, or 662, or combinations thereof, wherein the amino acid positions are relative to the reference sequence of SEQ ID NO: 2.

[0143] In some embodiments, the polypeptide sequence of the recombinant reverse transcriptase comprises at least a substitution 18E, 25E, 49G, 63L/P, 68S, 69R, 72M, 74K/M/P, 78V, 81K, 83E/A/C/R/W, 84N, 85R, 89A/M, 90I, 92T, 94L, 98S, 102C, 113G/T, 114G/K, 118R, 119Y, 129L, 130R/S, 132F, 134F/P, 163P, 167Y, 171L, 173A, 178L, 196C/H, 199L, 205M, 209A, 210L, 212K/N/V, 216R, 242A, 258T, 260G, 261N, 266V, 294Q, 297W, 298E/R, 300I, 303G/Q, 305P/S, 307K/N, 308G, 309E/P/T, 310R, 311A/I/P, 314A/K/M, 317C, 319C/G/S, 321A, 329S, 331E, 333V, 338V, 342W, 343A/V, 349G, 356P, 370G, 403H, 444L, 447G/L/R, 454A, 464L, 465S, 466K, 474A, 479D, 508L, 509E, 519P, 536E/A/N, 537W, 554T, 574D/Q, 576I, 583K, 595N, 598S, 606K/Q, 638H, 639H, or 662R, or combinations thereof, wherein the amino acid positions are relative to the reference sequence of SEQ ID NO: 2.

[0144] In some embodiments, the polypeptide sequence of the recombinant reverse transcriptase comprises at least a substitution D18E, S25E, A49G, Q63L/P, A68S, T69R, S72M, R74K/M/P, L78V, E81K, Q83E/A/C/R/W, E84N, G85R, H89A/M, V90I, R92T, I94L, I98S, V102C, V113G/T, R114G/K, T118R, N119Y, E129L, V130R/S, K132F, V134F/P, L163P, F167Y, R171L, H173A, P178L, T196C/H, R199L, K205M, T209A, I210L, D212K/N/V, H216R, G242A, E258T, S260G, D261N, A266V, E294Q, K297W, K298E/R, V300I, 1303G/Q, A305P, T307K/N, T308G, A309E/P/T, K310R, Q311A/I/P, E314A/K/M, G317C, A319C/G/S, F321A, F329S, T331E, A333V, P338V, E342W, K343A/V, A349G, F356P, A370G, P403H, I444L, I447G/L/R, N454A, M464L, T465S, N466K, S474A, E479D, H508L, Q509E, K519P, D536E/A/N, G537W, D554T, E574D/Q, M576I, M583K, D595N, Y598S, H606K/Q, L638H, P639H, or Q662R, or combinations thereof, wherein the amino acid positions are relative to the reference sequence of SEQ ID NO: 2.

[0145] In some embodiments, the polypeptide sequence of the recombinant reverse transcriptase comprises at least a substitution at amino acid position 49, 266, 298, 307, 444, 509, or 536, or combinations thereof, wherein the amino acid positions are relative to the reference sequence of SEQ ID NO: 2. In some embodiments, the polypeptide sequence of the recombinant reverse transcriptase comprises at least a substitution at amino acid position 49. In some embodiments, the polypeptide sequence of the recombinant reverse transcriptase comprises at least a substitution at amino acid position 266. In some embodiments, the polypeptide sequence of the recombinant reverse transcriptase comprises at least a substitution at amino acid position 298. In some embodiments, the polypeptide sequence of the recombinant reverse transcriptase comprises at least a substitution at amino acid position 307. In some embodiments, the polypeptide sequence of the recombinant reverse transcriptase comprises at least a substitution at amino acid position 444. In some embodiments, the polypeptide sequence of the recombinant reverse transcriptase comprises at least a substitution at amino acid position 509. In some embodiments, the polypeptide sequence of the recombinant reverse transcriptase comprises at least a substitution at amino acid position 536.

[0146] In some embodiments, the polypeptide sequence of the recombinant reverse transcriptase comprises at least a substitution at amino acid positions 49, 307, and 536. In some embodiments, the polypeptide sequence of the recombinant reverse transcriptase comprises at least a substitution at amino acid positions 49, 266, 307, and 536. In some embodiments, the polypeptide sequence of the recombinant reverse transcriptase comprises at least a substitution at amino acid positions 298, 444, and 509. In some embodiments, the polypeptide sequence of the recombinant reverse transcriptase comprises at least a substitution at amino acid positions 266, 298, 444, and 509. In some embodiments, the polypeptide sequence of the recombinant reverse transcriptase comprises at least a substitution at amino acid positions 49, 298, 307, 444, 509, and 536. In some embodiments, the polypeptide sequence of the recombinant reverse transcriptase comprises at least a substitution at amino acid positions 49, 266, 298, 307, 444, 509, and 536.

[0147] In some embodiments, the polypeptide sequence of the recombinant reverse transcriptase comprises at least a substitution 49G, 266V, 298E/R, 307K/N, 444L, 509E, or 536E/A/N, or combinations thereof, wherein the amino acid positions are relative to the reference sequence of SEQ ID NO:2. In some embodiments, the polypeptide sequence of the recombinant reverse transcriptase comprises at least a substitution A49G, A266V, K298E/R, T307K/N, I444L, Q509E, or D536E/A/N, or combinations thereof. In some embodiments, for the recombinant reverse transcriptase comprising one or more substitutions at amino acid positions 49, 266, 298, 307, 444, 509, and/or 536, the substitutions can be selected from the foregoing, e.g., 49G, 266V, 298E/R, 307K/N, 444L, 509E, and 536E/A/N.

[0148] In some embodiments, the polypeptide sequence of the recombinant reverse transcriptase comprises at least a substitution or substitution set at amino acid position 114/210/307, 114/309, 49, 63/68/216/258/261, 63/68/216/261, 63/209/314/665, 447/665, 331, 90/307/349, 114/173/331, or 266, wherein the amino acid positions are relative to the reference sequence of SEQ ID NO: 2.

[0149] In some embodiments, the polypeptide sequence of the recombinant reverse transcriptase comprises at least a substitution or substitution set 114K/210L/307K, 114K/309P, 49G, 63P/68S/216R/258T/261N, 63P/68S/216R/261N, 63L/209A/314K/665N, 447G/665N, 331E, 90I/307K/349G, 114K/173A/331E, or 266V, wherein the amino acid positions are relative to the reference sequence of SEQ ID NO: 2.

[0150] In some embodiments, the polypeptide sequence of the recombinant reverse transcriptase comprises at least a substitution or substitution set R114K/I210L/T307K, R114K/A309P, A49G, Q63P/A68S/H216R/E258T/D261N, Q63P/A68S/H216R/D261N, Q63L/T209A/E314K/D665N, I447G/D665N, T331E, V90I/T307K/A349G, R114K/H173A/T331E, or A266V, wherein the amino acid positions are relative to the reference sequence of SEQ ID NO: 2.

[0151] In some embodiments, the polypeptide sequence of the recombinant reverse transcriptase comprises at least a substitution or substitution set at amino acid position 454/508, 536/574, 309, 49/173/309/331, 90/331, 63/90/309/574/650, 90/173/209/210/321/574/598, 508/519, 49/63/90/216/309/321/536/574, 49/114/307/309/536, 307/321/536/574/650, 309/331/536/574/598/650, 173/331/536/574/598, 49/300/403, 74/242, 242/298/508/662, 260/509, 102/370/509, 49/173/216/349/536/598, 49/114/216/307/309/331, 49/90/173/216/307, 63/68/81/167/314/447/574, 49/210/307/309/321/536/574/650, 63/90/307/321/331/537/598, 370/464/465/509/554/576, 49/114/173/216/321/574/598, 90/216/321/650, 574/650, 49/209/210/307/309/536/598, 216/536/574, 49/173/210/309/321/536/598, 331/536/598, 321/574, 173/321/331/349/574, 49/307/536, 216/309/574/650, 94/370/474/576, 90/209/210/309/321/574, 49/63/90/173, 298, 49/300/454/662, 68/81/167/298/536, 49/454, 81, 49/114/173/309/349/536/574/650, 167/261/303/536, 18/102/554, 171/173/307/331/536, 173/216/536, 18/370/464/509, 49/114, 90/216/309/536/574, 444, 90/321/349/536/598/650, 49/163/309/321/536/574/650, 49/63/90/173/307/331/536/598/650, 68/81/167/258/447/466/536, 90/331/574, 49/321, 94/509, 90/173/321/536, 167/298/447/466, 173/216/307/309/536, 216/321, 49/90/173/209/309/331, 261/298/303/447/574, 171/298/444/519, 90/536/574/598/650, 49/63/90/210/307/321/598/650, 90/216/307/536/574, 18/94/102/260/370/464/554, 18/423/465/474, 167/261/447/536, 114/173/209/210, 307/309/536/574/598, 102/260/370/576, 574, 173/209/210/307/536, 216/309/536, 349, 447/536/606, 310/454/479/519/662, 49/90/209/598, 314/536, 171/300/454/479/508/662, 171/242/300/508/662, 49/331/536, 173/216/309/536/574/598, 536/598, 167/261/298/303/447/466/574, 173/536/598, 49/114/309/536/574/598, 49/114/309/349/536, 63/68/81/303/466, 63/90/209/216/307/309/321/349/536/574/598/650, 216, 173/210/307/598/650, 25/102/370/423, 68/261/298/303, 423/474, 94/423/474/554/576, 63/298/447/574, 49/63/90/173/307/321/331/574/595/650, 49/90/536/574, 508, 63/81/167/258/261/298/303/447, 114/331, 212/298/583/606, 49/173/536/574, 49/242/298/300/310/444/454/479, 49/309/321/536/598, 63/68/261/536, 300/444/508, or 298, wherein the amino acid positions are relative to the reference sequence of SEQ ID NO: 2.

[0152] In some embodiments, the polypeptide sequence of the recombinant reverse transcriptase comprises at least a substitution or substitution set 454A/508L, 536E/574Q, 309P, 49G/173A/309P/331E, 90I/331E, 63L/90I/309P/574D/650G, 90I/173A/209A/210L/321A/574D/598S, 508L/519P, 49G/63L/90I/216R/309P/321A/536E/574D, 49G/114K/307N/309P/536E, 307K/321A/536E/574D/650G, 309P/331E/536E/574Q/598S/650G, 173A/331E/536E/574D/598S, 49G/300I/403H, 74K/242A, 242A/298E/508L/662R, 260G/509E, 102C/370G/509E, 49G/173A/216R/349G/536E/598S, 49G/114K/216R/3071K/309P/331E, 49G/90I/173A/216R/307K, 63P/68S/81K/167Y/314A/447G/574Q, 49G/210L/307K/309P/321A/536E/574D/650G, 63L/90I/307K/321A/331E/537W/598S, 370G/464L/465S/509E/554T/576I, 49G/114K/173A/216R/321A/574D/598S, 90I/216R/321A/650G, 574D/650G, 49G/209A/210L/307K/309P/536E/598S, 216R/536E/574Q, 49G/173A/210L/309P/321A/536E/598S, 331E/536E/598S, 321A/574D, 173A/321A/331E/349G/574D, 49G/307K/536E, 216R/309P/574D/650G, 94L/370G/474A/576I, 90I/209A/210L/309P/321A/574D, 49G/63L/90I/173A, 298E, 49G/300I/454A/662R, 68S/811K/167Y/298R/536N, 49G/454A, 81K, 49G/114K/173A/309P/349G/536E/574D/650G, 167Y/261N/303Q/536N, 18E/102C/554T, 171L/173A/307K/331E/536E, 173A/216R/536E, 18E/370G/464L/509E, 49G/114K, 90I/216R/309P/536G/574D, 444L, 90I/321A/349G/536G/598S/650G, 49G/163P/309P/321A/536E/574D/650G, 49G/63L/90I/173A/307K/331E/536E/598S/650G, 68S/81K/167Y/258T/447G/466K/536N, 90I/331E/574D, 49G/321A, 94L/509E, 90I/173A/321A/536E, 167Y/298R/447G/466K, 173A/216R/307K/309P/536E, 216R/321A, 49G/90I/173A/209A/309P/331E, 261N/298R/303Q/447R/574Q, 171P/298E/444L/519P, 90I/536E/574D/598S/650G, 49G/63L/90I/210L/307K/321A/598S/650G, 90I/216R/307K/536E/574D, 18E/94L/102C/260G/370G/464L/554T, 18E/423R/465S/474A, 167Y/261N/447G/536G, 114K/173A/209A/210L, 307K/309P/536E/574D/598S, 102C/260G/370G/576I, 574D, 173A/209A/210L/307K/536E, 216R/309P/536E, 349G, 447L/536A/606Q, 310R/454A/479D/519P/662R, 49G/90I/209A/598S, 3141K/536N, 171P/300I/454A/479D/508L/662R, 171P/242A/300I/508L/662R, 49G/331E/536E, 173A/216R/309P/536E/574D/598S, 536E/598S, 167Y/261N/298R/303Q/447R/466K/574Q, 173A/536E/598S, 49G/114K/309P/536E/574D/598S, 49G/114K/309P/349G/536E, 63P/68S/81K/303Q/466K, 63L/90I/209A/216R/307K/309P/321A/349G/536E/574D/598S/650G, 216R, 173A/210L/307K/598S/650G, 25E/102C/370G/423R, 68S/261N/298R/303Q, 423R/474A, 94L/423R/474A/554T/576I, 63P/298R/447R/574Q, 49G/63L/90I/173A/307K/321A/331E/574D/595N/650G, 49G/90I/536E/574D, 508L, 63P/81K/167Y/258I/261N/298R/303Q/447G, 114K/331E, 212N/298E/583K/606K, 49G/173A/536E/574Q, 49G/242A/298E/300I/310R/444L/454A/479D, 49G/309P/321A/536E/598S, 63P/68S/261N/536G, 300I/444L/508L, or 298R, wherein the amino acid positions are relative to the reference sequence of SEQ ID NO: 2.

[0153] In some embodiments, the polypeptide sequence of the recombinant reverse transcriptase comprises at least a substitution or substitution set N454A/H508L, D536E/E574Q, A309P, A49G/H173A/A309P/T331E, V90I/T331E, Q63L/V90I/A309P/E574D/H650G, V90I/H173A/T209A/I210L/F321A/E574D/Y598S, H508L/K519P, A49G/Q63L/V90I/H216R/A309P/F321A/D536E/E574D, A49G/R114K/T307N/A309P/D536E, T307K/F321A/D536E/E574D/H650G, A309P/T331E/D536E/E574Q/Y598S/H650G, H173A/T331E/D536E/E574D/Y598S, A49G/V300I/P403H, R74K/G242A, G242A/K298E/H508L/Q662R, S260G/Q509E, V102C/A370G/Q509E, A49G/H173A/H216R/A349G/D536E/Y598S, A49G/R114K/H216R/T307K/A309P/T331E, A49G/V90I/H173A/H216R/T307K, Q63P/A68S/E81K/F167Y/E314A/I447G/E574Q, A49G/I210L/T307K/A309P/F321A/D536E/E574D/H650G, Q63LN90I/T307K/F321A/T331E/G537W/Y598S, A370G/M464L/T465S/Q509E/D554T/M576I, A49G/R114K/H173A/H216R/F321A/E574D/Y598S, V90I/H216R/F321A/H650G, E574D/H650G, A49G/T209A/I210L/T307K/A309P/D536E/Y598S, H216R/D536E/E574Q, A49G/H173A/I210L/A309P/F321A/D536E/Y598S, T331E/D536E/Y598S, F321A/E574D, H173A/F321A/T331E/A349G/E574D, A49G/T307K/D536E, H216R/A309P/E574D/H650G, I94L/A370G/S474A/M576I, V90I/T209A/I210L/A309P/F321A/E574D, A49G/Q63LN90I/H173A, K298E, A49G/V300I/N454A/Q662R, A68S/E81K/F167Y/K298R/D536N, A49G/N454A, E81K, A49G/R114K/H173A/A309P/A349G/D536E/E574D/H650G, F167Y/D261N/I303Q/D536N, D18E/V102C/D554T, R171L/H173A/T307K/T331E/D536E, H173A/H216R/D536E, D18E/A370G/M464L/Q509E, A49G/R114K, V90I/H216R/A309P/D536G/E574D, I444L, V90I/F321A/A349G/D536G/Y598S/H650G, A49G/L163P/A309P/F321A/D536E/E574D/H650G, A49G/Q63L/V90I/H173A/T307K/T331E/D536E/Y598S/H650G, A68S/E81K/F167Y/E258T/I447G/N466K/D536N, V90I/1331E/E574D, A49G/F321A, I94L/Q509E, V90I/H173A/F321A/D536E, F167Y/K298R/I447G/N466K, H173A/H216R/T307K/A309P/D536E, H216R/F321A, A49GN90I/H173A/T209A/A309P/T331E, D261N/K298R/I303Q/I447R/E574Q, R171P/K298E/I444L/K519P, V90I/D536E/E574D/Y598S/H650G, A49G/Q63L/V90I/I210L/T307K/F321A/Y598S/H650G, V90I/H216R/T307K/D536E/E574D, D18E/I94L/V102C/S260G/A370G/M464L/D554T, D18E/K423R/T465S/S474A, F167Y/D261N/I447G/D536G, R114K/H173A/T209A/I210L, T307K/A309P/D536E/E574D/Y598S, V102C/S260G/A370G/M576I, E574D, H173A/T209A/I210L/T307K/D536E, H216R/A309P/D536E, A349G, I447L/D536A/H606Q, K310R/N454A/E479D/K519P/Q662R, A49GN90I/T209A/Y598S, E314K/D536N, R171P/V300I/N454A/E479D/H508L/Q662R, R171P/G242AN300I/H508L/Q662R, A49G/T331E/D536E, H173A/H216R/A309P/D536E/E574D/Y598S, D536E/Y598S, F167Y/D261N/K298R/I303Q/I447R/N466K/E574Q, H173A/D536E/Y598S, A49G/R114K/A309P/D536E/E574D/Y598S, A49G/R114K/A309P/A349G/D536E, Q63P/A68S/E81K/I303Q/N466K, Q63LN90I/T209A/H216R/T307K/A309P/F321A/A349G/D536E/E574D/Y598S/H650G, H216R, H173A/1210L/T307K/Y598S/H650G, S25E/V102C/A370G/K423R, A68S/D261N/K298R/1303Q, K423R/S474A, 194L/K423R/S474A/D554T/M576I, Q63P/K298R/I447R/E574Q, A49G/Q63L/V90I/H173A/T307K/F321A/T331E/E574D/D595N/H650G, A49G/V90I/D536E/E574D, H508L, Q63P/E81K/F167Y/E258T/D261N/K298R/I303Q/I447G, R114K/T331E, D212N/K298E/R583K/H606K, A49G/H173A/D536E/E574Q, A49G/G242A/K298E/V300I/K310R/I444L/N454A/E479D, A49G/A309P/F321A/D536E/Y598S, Q63P/A68S/D261N/D536G, V300I/I444L/H508L, or K298R, wherein the amino acid positions are relative to the reference sequence of SEQ ID NO: 2.

[0154] In some embodiments, the polypeptide sequence of the recombinant reverse transcriptase comprises at least a substitution or substitution set at amino acid position 134, 74, 83, 319, 92, 329, 343,311,338,196,69,72,294,83,134,130,305,319,113,297,319,114,308,309,342,205,212, 199,83,303,309,78,113,132,311,119,83,98,314,129,343,196,74,356,89,212, 444/508/509/574, 63/260/298/300/331/444/509, 63/90/209/444/508/574, 298/444/509, 63/90/508/509/574/595, 83, 311, 89, 130, 178, or 118, wherein the amino acid positions are relative to the reference sequence of SEQ ID NO: 2.

[0155] In some embodiments, the polypeptide sequence of the recombinant reverse transcriptase comprises at least a substitution or substitution set 134P, 74P, 83A, 319G, 92T, 329S, 343A, 311P, 338V, 196C, 69R, 72M, 294Q, 83W, 134F, 130S, 305P, 319S, 113T, 297W, 319C, 114G, 308G, 309E, 342W, 205M, 212K, 199L, 83C, 303G, 309T, 78V, 113G, 132F, 311I, 119Y, 83E, 98S, 314M, 129L, 343V, 196H, 74M, 356P, 89A, 212V, 444L/508L/509E/574D, 63L/260G/298R/300I/331E/444L/509E, 63L/90I/209A/444L/508L/574Q, 298R/444L/509E, 63L/90I/508L/509E/574Q/595N, 83R, 311A, 89M, 130R, 178L, or 118R, wherein the amino acid positions are relative to the reference sequence of SEQ ID NO: 2.

[0156] In some embodiments, the polypeptide sequence of the recombinant reverse transcriptase comprises at least a substitution or substitution set V134P, R74P, Q83A, A319G, R92T, F329S, K343A, Q311P, P338V, T196C, T69R, S72M, E294Q, Q83W, V134F, V130S, A305P, A319S, V113T, K297W, A319C, R114G, T308G, A309E, E342W, K205M, D212K, R199L, Q83C, I303G, A309T, L78V, V113G, K132F, Q311I, N119Y, Q83E, 198S, E314M, E129L, K343V, T196H, R74M, F356P, H89A, D212V, I444L/H508L/Q509E/E574D, Q63L/5260G/K298RN300I/T331E/I444L/Q509E, Q63LN90I/T209A/I444L/H508L/E574Q, K298R/I444L/Q509E, Q63L/V90I/H508L/Q509E/E574Q/D595N, Q83R, Q311A, H89M, V130R, P178L, or T118R, wherein the amino acid positions are relative to the reference sequence of SEQ ID NO: 2.

[0157] In some embodiments, the polypeptide sequence of the recombinant reverse transcriptase comprises at least a substitution or substitution set at amino acid position 309/342, 309, 129, 574, 85, 98/119/129/132/196, 98/317/343/356, 205/212/309/319/342, 78/132/314, 78/83/98, 78/83/119/132/196, 78/83, 78/83/356, 78, 119/129/132, 178/303/331/338/508, 311/314, 63/297/303/305, 63/178/209/260/574, 63/300/338, 83/294, 83/92/343/574, 83/92/134/574, 83/196/329/343, 83/196, 83/134/196/294/305/311/319/329/343/574, 83, 83/309, 83/319/342, 83/205, 83/114, 83/114/309, 83/114/319, 83/199/212/309/319/639, 83/199, 83/342, 83/308/309/595/638, 83/113/114/205/212, 83/130, 114/309, 114/212/309/342/639, 114/205, 114, 114/130/319, 114/130/212/342, 114/130/309, 199/309, 199/205, 342, 343/595, 74, 74/129, 74/83/129/132/212, 74/83/92/343, 74/83/134/294/574, 74/83, 74/329/574, 74/92/196/294/329, 92, 72, 72/294/311/329/343, 72/294, 72/294/311/329, 72/83/343, 72/74/294, 72/74/83/319/329, 72/74/83/84, 72/74/83/134/196/294, 72/74, 72/74/92/294/329, 72/74/92, 72/74/92/134/343, 72/74/134/196/319/329, 72/196/311/329/574, 72/134/196, 118/178/338, 69/89/178/303/305/338/574, 113, 113/178/260, 113/309, 113/212/309, 113/342, 113/114, 113/114/212, 113/114/205/319/342, 113/114/342, 113/114/130, 130/205/333, 134, or 134/294, wherein the amino acid positions are relative to the reference sequence of SEQ ID NO:2.

[0158] In some embodiments, the polypeptide sequence of the recombinant reverse transcriptase comprises at least a substitution or substitution set 309E/342W, 309T, 129L, 574Q, 85R, 98S/119Y/129L/132F/196H, 98S/317C/343V/356P, 205M/212K//309E/319S/342W, 78V/132F/314M, 78V/83E/98S, 78V/83E/119Y/132F/196H, 78V/83E, 78V/83E356P, 78V, 119Y/129L/132F, 178L/303G/331E/338V/508L, 311I/314M, 63L/297W/303G/305P, 63L/178L/209A/260G/574Q, 63L/300I/338V, 83A/294Q, 83A/92T/343A/574Q, 83A/92T/134P/574Q, 83A/196C/329S/343A, 83A/196C, 83A/134F/196C/294Q/305S/311P/319G/329S/343A/574Q, 83C, 83C/309T, 83C/319S/342W, 83C/205M, 83C/114G, 83C/114G/309T, 83C/114G/319C, 83C/199L/212K/309E/319C/639H, 83C/199L, 83C/342W, 83C/308G/309E/595N/638H, 83C/113T/114G/205M/212K, 83C/130S, 114G/309E, 114G/212K/309E/342W/639H, 114G/205M, 114G, 114G/130S/319S, 114G/130S/212K/342W, 114G/130S/309E, 199L/309T, 199L/205M, 342W, 343A/595N, 74M, 74M/129L, 74M/83E/129L/132F/212V, 74P/83A/92T/343A, 74P/83A/134P/294Q/574Q, 74P/83W, 74P/329S/574Q, 74P/92T/196C/294Q/329S, 92T, 72M, 72M/294Q/311A/329S/343A, 72M/294Q, 72M/294Q/311A/329S, 72M/83A/343A, 72M/74P/294Q, 72M/74P/83A/319G/329S, 72M/74P/83A/84N, 72M/74P/83A/134F/196C/294Q, 72M/74P, 72M/74P/92T/294Q/329S, 72M/74P/92T, 72M/74P/92T/134P/343A, 72M/74P/134F/196C/319G/329S, 72M/196C/311A/329S/574Q, 72M/134P/196C, 118R/178L/338V, 69R/89A/178L/303G/305P/338V/574Q, 113G, 113G/178L/260G, 113T/309E, 113T/212K/309E, 113T/342W, 113T/114G, 113T/114G/212K, 113T/114G/205M/319C/342W, 113T/114G/342W, 113T/114G/130S, 113T, 130S/205M/333V, 134P, or 134P/294Q, wherein the amino acid positions are relative to the reference sequence of SEQ ID NO: 2.

[0159] In some embodiments, the polypeptide sequence of the recombinant reverse transcriptase comprises at least a substitution or substitution set A309E/E342W, A309T, E129L, E574Q, G85R, 198S/N119Y/E129L/K132F/T196H, I98S/G317C/K343V/F356P, K205M/D212K/A309E/A319S/E342W, L78V/K132F/E314M, L78V/Q83E/I98S, L78V/Q83E/N119Y/K132F/T196H, L78V/Q83E, L78V/Q83E, L78V/Q83E/F356P, L78V, N119Y/E129L/K132F, P178L/I303G/T331E/P338V/H508L, Q311I/E314M, Q63L/K297W/1303G/A305P, Q63L/P178L/T209A/S260G/E574Q, Q63LN300I/P338V, Q83A/E294Q, Q83A/R92T/K343A/E574Q, Q83A/R92T/V134P/E574Q, Q83A/T196C/F329S/K343A, Q83A/T196C, Q83A/V134F/T196C/E294Q/A305S/Q311P/A319G/F329S/K343A/E574Q, Q83C, Q83C/A309T, Q83C/A319S/E342W, Q83C/K205M, Q83C/R114G, Q83C/R114G/A309T, Q83C/R114G/A319C, Q83C/R199L/D212K/A309E/A319C/P639H, Q83C/R199L, Q83C/E342W, Q83C/T308G/A309E/D595N/L638H, Q83C/V113T/R114G/K205M/D212K, Q83C/V130S, R114G/A309E, R114G/D212K/A309E/E342W/P639H, R114G/K205M, R114G, R114GN130S/A319S, R114G/V130S/D212K/E342W, R114GN130S/A309E, R199L/A309T, R199L/K205M, E342W, K343A/D595N, R74M, R74M/E129L, R74M/Q83E/E129L/K132F/D212V, R74P/Q83A/R92T/K343A, R74P/Q83A/V134P/E294Q/E574Q, R74P/Q83W, R74P/F329S/E574Q, R74P/R92T/T196C/E294Q/F329S, R92T, S72M, S72M/E294Q/Q311A/F329S/K343A, S72M/E294Q, S72M/E294Q/Q311A/F329S, S72M/Q83A/K343A, S72M/R74P/E294Q, S72M/R74P/Q83A/A319G/F329S, S72M/R74P/Q83A/E84N, S72M/R74P/Q83AN134F/T196C/E294Q, S72M/R74P, S72M/R74P/R92T/E294Q/F329S, S72M/R74P/R92T, S72M/R74P/R92T/V134P/K343A, S72M/R74PN134F/T196C/A319G/F329S, S72M/T196C/Q311A/F329S/E574Q, S72MN134P/T196C, T118R/P178L/P338V, T69R/H89A/P178L/I303G/A305P/P338V/E574Q, V113G, V113G/P178L/S260G, V113T/A309E, V113T/D212K/A309E, V113T/E342W, V113T/R114G, V113T/R114G/D212K, V113T/R114G/K205M/A319C/E342W, V113T/R114G/E342W, V113T/R114GN130S, V113T, V130S/K205M/A333V, V134P, or V134P/E294Q, wherein the amino acid positions are relative to the reference sequence of SEQ ID NO: 2.

[0160] In some embodiments, the polypeptide sequence of the recombinant reverse transcriptase comprises at least a substitution or substitution set 266V/454A/508L, 266V/536E/574Q, 266V/309P, 49G/173A/266V/309P/331E, 90I/266V/331E, 63L/90I/266V/309P/574D/650G, 90I/173A/209A/210L/266V/321A/574D/598S, 266V/508L/519P, 49G/63L/90I/216R/266V/309P/321A/536E/574D, 49G/114K/266V/307N/309P/536E, 266V/307K/321A/536E/574D/650G, 266V/309P/331E/536E/574Q/598S/650G, 173A/266V/331E/536E/574D/598S, 49G/266V/300I/403H, 74K/242A/266V, 242A/266V/298E/508L/662R, 260G/266V/509E, 102C/266V/370G/509E, 49G/173A/216R/266V/349G/536E/598S, 49G/114K/216R/266V/3071K/309P/331E, 49G/90I/173A/216R/266V/307K, 63P/68S/81K/167Y/266V/314A/447G/574Q, 49G/210L/266V/307K/309P/321A/536E/574D/650G, 63L/90I/266V/307K/321A/331E/537W/598S, 266V/370G/464L/465S/509E/554T/576I, 49G/114K/173A/216R/266V/321A/574D/598S, 90I/216R/266V/321A/650G, 266V/574D/650G, 49G/209A/210L/266V/307K/309P/536E/598S, 216R/266V/536E/574Q, 49G/173A/210L/266V/309P/321A/536E/598S, 266V/331E/536E/598S, 266V/321A/574D, 173A/266V/321A/331E/349G/574D, 49G/266V/307K/536E, 216R/266V/309P/574D/650G, 94L/266V/370G/474A/576I, 90I/209A/210L/266V/309P/321A/574D, 49G/63L/90I/173A/266V, 266V/298E, 49G/266V/300I/454A/662R, 68S/81K/167Y/266V/298R/536N, 49G/266V/454A, 811K/266V, 49G/114K/173A/266V/309P/349G/536E/574D/650G , 167Y/261N/266V/303Q/536N, 18E/102C/266V/554T, 171L/173A/266V/307K/331E/536E, 173A/216R/266V/536E, 18E/266V/370G/464L/509E, 49G/114K/266V, 90I/216R/266V/309P/536G/574D, 266V/444L, 90I/266V/321A/349G/536G/598S/650G, 49G/163P/266V/309P/321A/536E/574D/650G, 49G/63L/90I/173A/266V/307K/331E/536E/598S/650G, 68S/81K/167Y/258T/266V/447G/466K/536N, 90I/266V/331E/574D, 49G/266V/321A, 94L/266V/509E, 90I/173A/266V/321A/536E, 167Y/266V/298R/447G/466K, 173A/216R/266V/307K/309P/536E, 216R/266V/321A, 49G/90I/173A/209A/266V/309P/331E, 261N/266V/298R/303Q/447R/574Q, 171P/266V/298E/444L/519P, 90I/266V/536E/574D/598S/650G, 49G/63L/90I/210L/266V/307K/321A/598S/650G, 90I/216R/266V/307K/536E/574D, 18E/94L/102C/260G/266V/370G/464L/554T, 18E/266V/423R/465S/474A, 167Y/261N/266V/447G/536G, 114K/173A/209A/210L/266V, 266V/307K/309P/536E/574D/598S, 102C/260G/266V/370G/576I, 266V/574D, 173A/209A/210L/266V/307K/536E, 216R/266V/309P/536E, 266V/349G, 266 V/447L/536A/606Q, 266V/310R/454A/479D/519P/662R, 49G/90I/209A/266V/598S, 266V/314K/536N, 171P/266V/300I/454A/479D/508L/662R, 171P/242A/266V/300I/508L/662R, 49G/266V/331E/536E, 173A/216R/266V/309P/536E/574D/598S, 266V/536E/598S, 167Y/261N/266V/298R/303Q/447R/466K/574Q, 173A/266V/536E/598S, 49G/114K/266V/309P/536E/574D/598S, 49G/114K/266V/309P/349G/536E, 63P/68S/81K/266V/303Q/466K, 63L/90I/209A/216R/266V/307K/309P/321A/349G/536E/574D/598S/650G, 216R/266V, 173A/210L/266V/307K/598S/650G, 25E/102C/266V/370G/423R, 68S/261N/266V/298R/303Q, 266V/423R/474A, 94L/266V/423R/474A/554T/576I, 63P/266V/298R/447R/574Q, 49G/63L/90I/173A/266V/307K/321A/331E/574D/595N/650G, 49G/90I/266V/536E/574D, 266V/508L, 63P/81K/167Y/258T/266V/261N/298R/303Q/447G, 114K/266V/331E, 212N/266V/298E/583K/606K, 49G/173A/266V/536E/574Q, 49G/242A/266V/298E/300I/310R/444L/454A/479D, 49G/266V/309P/321A/536E/598S, 63P/68S/261N/266V/536G, 266 V/300I/444L/508L, or 266V/298R, wherein the amino acid positions are relative to the reference sequence of SEQ ID NO:2.

[0161] In some embodiments, the polypeptide sequence of the recombinant reverse transcriptase comprises at least a substitution or substitution set 49G/134P/266V/307K/536E, 49G/74P/266V/307K/536E, 49G/83A/266V/307K/536E, 49G/266V/307K/319G/536E, 49G/92T/266V/307K/536E, 49G/266V/307K/329S/536E, 49G/266V/307K/343A/536E, 49G/266V/307K/311P/536E, 49G/266V/307K/338V/536E, 49G/196C/266V/307K/536E, 49G/69R/266V/307K/536E, 49G/72M/266V/307K/536E, 49G/266V/294Q/307K/536E, 49G/83W/266V/294Q/307K/536E, 49G/134F/266V/307K/536E, 49G/130S/266V/307K/536E, 49G/266V/305P/307K/536E, 49G/266V/307K/319S/536E, 49G/113T/266V/307K/536E, 49G/266V/297W/307K/536E, 49G/266V/307K/319C/536E, 49G/114G/266V/307K/536E, 49G/266V/307K/308G/536E, 49G/266V/307K/309E/536E, 49G/266V/307K/342W/536E, 49G/205M/266V/307K/536E, 49G/212K/266V/307K/536E, 49G/199L/266V/307K/536E, 49G/83C/266V/307K/536E, 49G/266V/303G/307K/536E, 49G/266V/307K/309T/536E, 49G/78V/266V/307K/536E, 49G/113G/266V/307K/536E, 49G/132F/266V/307K/536E, 49G/266V/307K/311I/536E, 49G/119Y/266V/307K/536E, 49G/83E/266V/307K/536E, 49G/98S/266V/307K/536E, 49G/266V/307K/314M/536E, 49G/129L/266V/307K/536E, 49G/266V/307K/343V/536E, 49G/196H/266V/307K/536E, 49G/74M/266V/307K/536E, 49G/266V/307K/356P/536E, 49G/89A/266V/307K/536E, 49G/212V/266V/307K/536E, 49G/266V/307K/444L/508L/509E/536E/574D, 49G/63L/260G/266V/298R/300I/307K/331E/444L/509E/536E, 49G/63L/90I/209A/266V/307K/444L/508L/536E/574Q, 49G/266V/298R/307K/444L/509E/536E, 49G/63L/90I/266V/307K/508L/509E/536E/574Q/595N, 49G/83R/266V/307K/536E, 49G/266V/307K/311A/536E, 49G/89M/266V/307K/536E, 49G/130R/266V/307K/536E, 49G/178L/266V/307K/536E, or 49G/118R/266V/307K/536E, wherein the amino acid positions are relative to the reference sequence of SEQ ID NO:2.

[0162] In some embodiments, the polypeptide sequence of the recombinant reverse transcriptase comprises at least a substitution or substitution set 49G/266V/298R/307K/309E/342W/444L/509E/536E, 49G/266V/298R/307K/309T/444L/509E/536E, 49G/129L/266V/307K/444L/509E/536E, 49G/266V/298R/307K/444L/536E/574Q, 49G/85R/266V/298R/307K/444L/509E/536E, 49G/985/119Y/129L/132F/196H/266V/307K/444L/509E/536E, 49G/985/266V/307K/317C/343V/356P/444L/509E/536E, 49G/205M/212K/266V/307K/309E/319S/342W/444L/536E, 49G/266V/298R/307K/509E/536E, 49G/78V/132F/266V/298R/307K/314M/444L/509E/536E, 49G/78V/83E/98S/266V/298R/307K/444L/509E/536E, 49G/78V/83E/119Y/132F/196H/266V/298R/307K/509E/536E, 49G/78V/83E/266V/307K/444L/509E/536E, 49G/78V/83E/266V/307K/444L/536E, 49G/78V/83E/266V/307K/356P/444L/509E/536E, 49G/78V/266V/307K/509E/536E, 49G/119Y/129L/132F/266V/298R/307K/444L/509E/536E, 49G/178L/266V/303G/307K/331E/338V/444L/508L/509E/536E, 49G/266V/298R/307K/311I/314M/444L/509E/536E, 49G/63L/266V/297W/298R/303G/305P/307K/509E/536E, 49G/63L/178L/209A/260G/266V/298R/307K/444L/509E/536E/574Q, 49G/63L/266V/298R/300I/307K/338V/444L/509E/536E, 49G/83A/266V/294Q/298R/307K/444L/509E/536E, 49G/83A/92T/266V/307K/343A/444L/509E/536E/574Q, 49G/83A/92T/134P/266V/298R/307K/509E/536E/574Q, 49G/83A/196C/266V/298R/307K/329S/343A/444L/509E/536E, 49G/83A/196C/266V/307K/444L/536E, 49G/83A/134F/196C/294Q/266V/305S/307K/311P/319G/329S/343A/509E/536E/574Q, 49G/83C/266V/298R/307K/444L/509E/536E, 49G/83C/266V/298R/307K/309T/444L/509E/536E, 49G/83C/266V/298R/307K/319S/342W/444L/536E, 49G/83C/205M/266V/298R/307K/509E/536E, 49G/83C/266V/298R/307K/509E/536E, 49G/83C/114G/266V/298R/307K/444L/509E/536E, 49G/83C/114G/266V/298R/307K/309T/444L/536E, 49G/83C/114G/266V/307K/319C/444L/509E/536E, 49G/83C/199L/212K/266V/307K/309E/319C/509E/536E/639H, 49G/83C/199L/266V/298R/307K/444L/536E, 49G/83C/266V/307K/444L/509E/536E, 49G/83C/266V/307K/342W/444L/509E/536E, 49G/83C/266V/298R/307K/308G/309E/444L/509E/536E/595N/638H, 49G/83C/113T/114G/205M/212K/266V/298R/307K/444L/509E/536E, 49G/83C/130S/266V/307K/509E/536E, 49G/114G/266V/298R/307K/309E/444L/509E/536E, 49G/114G/266V/298R/307K/309E/444L/536E, 49G/114G/212K/266V/298R/307K/309E/342W/444L/509E/536E/639H, 49G/114G/205M/266V/298R/307K/509E/536E, 49G/114G/266V/307K/444L/509E/536E, 49G/114G/1305S/266V/298R/307K/319S/509E/536E, 49G/114G/130S/212K/266V/307K/342W/444L/509E/536E, 49G/114G/130S/266V/307K/309E/444L/509E/536E, 49G/199L/266V/298R/307K/309T/444L/509E/536E, 49G/199L/205M/266V/298R/307K/509E/536E, 49G/266V/307K/444L/509E/536E, 49G/266V/307K/342W/444L/509E/536E, 49G/266V/307K/444L/536E, 49G/266V/307K/343A/509E/536E/595N, 49G/74M/266V/298R/307K/444L/509E/536E, 49G/74M/129L/266V/307K/509E/536E, 49G/74M/83E/129L/132F/212V/266V/298R/307K/444L/536E, 49G/74P/83A/92T/266V/307K/343A/444L/536E, 49G/74P/83A/134P/266V/294Q/307K/444L/509E/536E/574Q, 49G/74P/83W/266V/298R/307K/536E, 49G/74P/266V/307K/329S/509E/536E/574Q, 49G/74P/92T/196C/266V/294Q/298R/307K//329S/444L/509E/536E, 49G/92T/266V/307K/444L/536E, 49G/72M/266V/298R/307K/444L/509E/536E, 49G/72M/266V/294Q/298R/307K/311A/329S/343A/509E/536E, 49G/72M/266V/294Q/307K/509E/536E, 49G/72M/266V/294Q/307K/311A/329S/509E/536E, 49G/72M/266V/298R/307K/444L/536E, 49G/72M/83A/266V/307K/343A/509E/536E, 49G/266V/72M/74P/294Q/307K/509E/536E, 49G/72M/74P/83A/266V/298R/307K/319G/329S/444L/536E, 49G/72M/74P/83A/84N/266V/298R/307K/509E/536E, 49G/72M/74P/83A/134F/196C/266V/294Q/307K/444L/509E/536E, 49G/72M/74P/266V/307K/444L/536E, 49G/72M/74P/92T/266V/294Q/307K/329S/444L/509E/536E, 49G/72M/74P/92T/266V/307K/444L/509E/536E, 49G/72M/74P/92T/134P/266V/307K/343A/509E/536E, 49G/72M/74P/134F/196C/266V/307K/319G/329S/444L/536E, 49G/72M/196C/266V/298R/307K/311A/329S/444L/509E/536E/574Q, 49G/72M/134P/196C/266V/307K/444L/509E/536E, 49G/118R/178L/266V/298R/307K/338V/444L/509E/536E, 49G/69R/89A/178L/266V/298R/303G/305P/307K/338V/444L/509E/536E/574Q, 49G/113G/266V/298R/307K/444L/509E/536E, 49G/113G/178L/260G/266V/298R/307K/444L/509E/536E, 49G/113T/266V/298R/307K/309E/444L/509E/536E, 49G/113T/212K/266V/298R/307K/309E/444L/509E/536E, 49G/113T/266V/298R/307K/342W/444L/509E/536E, 49G/113T/114G/266V/298R/307K/444L/509E/536E, 49G/113T/114G/212K/266V/298R/307K/444L/509E/536E, 49G/113T/114G/205M/266V/298R/307K/319C/342W/444L/509E/536E, 49G/113T/114G/266V/307K/342W/444L/509E/536E, 49G/113T/114G/1305S/266V/298R/307K/444L/509E/536E, 49G/113T/266V/307K/444L/509E/536E, 49G/113T/266V/298R/307K/309E/509E/536E, 49G/130S/205M/266V/298R/307K/333V/509E/536E, 49G/134P/266V/298R/307K/444L/509E/536E, or 49G/134P/266V/294Q/298R/307K/536E, wherein the amino acid positions are relative to the reference sequence of SEQ ID NO: 2.

[0163] In some embodiments, a recombinant reverse transcriptase of the present disclosure comprises a polypeptide sequence having at least 75%, 80%, 81%, 82%, 83%, 84%, 85%, 86%, 87%, 88%, 89%, 90%, 91%, 92%, 93%, 94%, 95%, 96%, 97%, 98%, 99%, or more sequence identity to a reference sequence corresponding to residues 12 to 687 of SEQ ID NO: 24, 94, or 352, or to a reference sequence corresponding to SEQ ID NO: 24, 94, or 352.

[0164] In some embodiments, a recombinant reverse transcriptase of the present disclosure comprises a polypeptide sequence having at least 75%, 80%, 81%, 82%, 83%, 84%, 85%, 86%, 87%, 88%, 89%, 90%, 91%, 92%, 93%, 94%, 95%, 96%, 97%, 98%, 99%, or more sequence identity to a reference sequence corresponding to residues 12 to 687 of SEQ ID NO: 24, 94, or 352, or to a reference sequence corresponding to SEQ ID NO: 24, 94, or 352, with the proviso that the polypeptide sequence does not include the sequence corresponding to residues 12 to 687 of SEQ ID NO: 2.

[0165] In some embodiments, the recombinant reverse transcriptase comprises a polypeptide sequence having at least 75%, 80%, 81%, 82%, 83%, 84%, 85%, 86%, 87%, 88%, 89%, 90%, 91%, 92%, 93%, 94%, 95%, 96%, 97%, 98%, 99%, or more sequence identity to a reference sequence corresponding to residues 12 to 687 of SEQ ID NO: 24, 94, or 352, or to a reference sequence corresponding to SEQ ID NO: SEQ ID NO: 24, 94, or 352, wherein the polypeptide sequence comprises one or more substitutions relative to the reference sequence corresponding to residues 12 to 687 of SEQ ID NO: 24, 94, or 352, or to the reference sequence corresponding to SEQ ID NO: 24, 94, or 352.

[0166] In some embodiments, the recombinant reverse transcriptase comprises a polypeptide sequence having at least 75%, 80%, 81%, 82%, 83%, 84%, 85%, 86%, 87%, 88%, 89%, 90%, 91%, 92%, 93%, 94%, 95%, 96%, 97%, 98%, 99%, or more sequence identity to a reference sequence corresponding to residues 12 to 687 of SEQ ID NO: 24, 94, or 352, or to a reference sequence corresponding to SEQ ID NO: SEQ ID NO: 24, 94, or 352, wherein the polypeptide sequence comprises one or more substitutions relative to the reference sequence corresponding to residues 12 to 687 of SEQ ID NO: 24, 94, or 352, or to the reference sequence corresponding to SEQ ID NO: 24, 94, or 352, with the proviso that the polypeptide sequence does not include the sequence corresponding to residues 12 to 687 of SEQ ID NO: 2.

[0167] In some embodiments, the recombinant reverse transcriptase comprises a polypeptide sequence having at least 75%, 80%, 81%, 82%, 83%, 84%, 85%, 86%, 87%, 88%, 89%, 90%, 91%, 92%, 93%, 94%, 95%, 96%, 97%, 98%, 99%, or more sequence identity to a reference sequence corresponding to residues 12 to 687 of SEQ ID NO: 94 or 352, or to a reference sequence corresponding to SEQ ID NO: SEQ ID NO: 94 or 352, wherein the polypeptide sequence comprises one or more substitutions relative to the reference sequence corresponding to residues 12 to 687 of SEQ ID NO: 24, or to the reference sequence corresponding to SEQ ID NO: 24.

[0168] In some embodiments, the recombinant reverse transcriptase comprises a polypeptide sequence having at least 75%, 80%, 81%, 82%, 83%, 84%, 85%, 86%, 87%, 88%, 89%, 90%, 91%, 92%, 93%, 94%, 95%, 96%, 97%, 98%, 99%, or more sequence identity to a reference sequence corresponding to residues 12 to 687 of SEQ ID NO: 352, or to a reference sequence corresponding to SEQ ID NO: SEQ ID NO: 352, wherein the polypeptide sequence comprises one or more substitutions relative to the reference sequence corresponding to residues 12 to 687 of SEQ ID NO: 94, or to the reference sequence corresponding to SEQ ID NO: 94.

[0169] In some embodiments of the foregoing, the polypeptide sequence of the recombinant reverse transcriptase comprises at least a substitution at amino acid position 18, 25, 49, 63, 68, 69, 72, 74, 78, 81, 83, 89, 90, 92, 94, 98, 102, 113, 114, 118, 119, 129, 130, 132, 134, 163, 167, 171, 173, 178, 196, 199, 205, 209, 210, 212, 216, 242, 258, 260, 261, 266, 294, 297, 298, 300, 303, 305, 307, 308, 309, 310, 311, 314, 319, 321, 329, 331, 338, 342, 343, 349, 356, 370, 403, 423, 444, 447, 454, 464, 465, 466, 474, 479, 508, 509, 519, 536, 537, 554, 574, 576, 583, 595, 598, 606, 650, 662, or 665, or combinations thereof, wherein the amino acid positions are relative to the reference sequence of SEQ ID NO: 24, 94, or 352.

[0170] In some embodiments of the foregoing, the polypeptide sequence of the recombinant reverse transcriptase comprises at least an amino acid residue 18E, 25E, 49G, 63L/P, 68S, 69R, 72M, 74K/M/P, 78V, 81K, 83E/A/C/R/W, 89A/M, 90I, 92T, 94L, 98S, 102C, 113G/T, 114G/K, 118R, 119Y, 129L, 130R/S, 132F, 134F/P, 163P, 167Y, 171L, 173A, 178L, 196C/H, 199L, 205M, 209A, 210L, 212K/N/V, 216R, 242A, 258T, 260G, 261N, 266V, 294Q, 297W, 298E/R, 300I, 303G/Q, 305P, 307K/N, 308G, 309E/P/T, 310R, 311A/I/P, 314A/K/M, 319C/G/S, 321A, 329S, 331E, 338V, 342W, 343A/V, 349G, 356P, 370G, 403H, 444L, 447G/L/R, 454A, 464L, 465S, 466K, 474A, 479D, 508L, 509E, 519P, 536E/A/N, 537W, 554T, 574D/Q, 576I, 583K, 595N, 598S, 606K/Q, or 662R, or combinations thereof, wherein the amino acid positions are relative to the reference sequence of SEQ ID NO: 24, 94, or 352.

[0171] In some embodiments, the polypeptide sequence of the recombinant reverse transcriptase comprises at least a substitution at amino acid position 49, 266, 298, 307, 444, 509, or 536, or combinations thereof, wherein the amino acid positions are relative to the reference sequence of SEQ ID NO: 24, 94, or 352.

[0172] In some embodiments, the polypeptide sequence of the recombinant reverse transcriptase comprises at least an amino acid residue 49G, 266V, 298E/R, 307K/N, 444L, 509E, or 536E/A/N, or combinations thereof, wherein the amino acid positions are relative to the reference sequence of SEQ ID NO: 24, 94, or 352.

[0173] In some embodiments, the recombinant reverse transcriptase comprises a polypeptide sequence having at least 75%, 80%, 81%, 82%, 83%, 84%, 85%, 86%, 87%, 88%, 89%, 90%, 91%, 92%, 93%, 94%, 95%, 96%, 97%, 98%, 99%, or more sequence identity to a reference sequence corresponding to residues 12 to 687 of SEQ ID NO: 24, or to a reference sequence corresponding to SEQ ID NO: 24, wherein the polypeptide sequence comprises one or more substitutions relative to the reference sequence corresponding to residues 12 to 687 of SEQ ID NO: 24, or to the reference sequence corresponding to SEQ ID NO: 24.

[0174] In some embodiments, the polypeptide sequence of the recombinant reverse transcriptase comprises at least a substitution or substitution set at amino acid position 454/508, 536/574, 309, 49/173/309/331, 90/331, 63/90/309/574/650, 90/173/209/210/321/574/598, 508/519, 49/63/90/216/309/321/536/574, 49/114/307/309/536, 307/321/536/574/650, 309/331/536/574/598/650, 173/331/536/574/598, 49/300/403, 74/242, 242/298/508/662, 260/509, 102/370/509, 49/173/216/349/536/598, 49/114/216/307/309/331, 49/90/173/216/307, 63/68/81/167/314/447/574, 49/210/307/309/321/536/574/650, 63/90/307/321/331/537/598, 370/464/465/509/554/576, 49/114/173/216/321/574/598, 90/216/321/650, 574/650, 49/209/210/307/309/536/598, 216/536/574, 49/173/210/309/321/536/598, 331/536/598, 321/574, 173/321/331/349/574, 49/307/536, 216/309/574/650, 94/370/474/576, 90/209/210/309/321/574, 49/63/90/173, 298, 49/300/454/662, 68/81/167/298/536, 49/454, 81, 49/114/173/309/349/536/574/650, 167/261/303/536, 18/102/554, 171/173/307/331/536, 173/216/536, 18/370/464/509, 49/114, 90/216/309/536/574, 444, 90/321/349/536/598/650, 49/163/309/321/536/574/650, 49/63/90/173/307/331/536/598/650, 68/81/167/258/447/466/536, 90/331/574, 49/321, 94/509, 90/173/321/536, 167/298/447/466, 173/216/307/309/536, 216/321, 49/90/173/209/309/331, 261/298/303/447/574, 171/298/444/519, 90/536/574/598/650, 49/63/90/210/307/321/598/650, 90/216/307/536/574, 18/94/102/260/370/464/554, 18/423/465/474, 167/261/447/536, 114/173/209/210, 307/309/536/574/598, 102/260/370/576, 574, 173/209/210/307/536, 216/309/536, 349, 447/536/606, 310/454/479/519/662, 49/90/209/598, 314/536, 171/300/454/479/508/662, 171/242/300/508/662, 49/331/536, 173/216/309/536/574/598, 536/598, 167/261/298/303/447/466/574, 173/536/598, 49/114/309/536/574/598, 49/114/309/349/536, 63/68/81/303/466, 63/90/209/216/307/309/321/349/536/574/598/650, 216, 173/210/307/598/650, 25/102/370/423, 68/261/298/303, 423/474, 94/423/474/554/576, 63/298/447/574, 49/63/90/173/307/321/331/574/595/650, 49/90/536/574, 508, 63/81/167/258/261/298/303/447, 114/331, 212/298/583/606, 49/173/536/574, 49/242/298/300/310/444/454/479, 49/309/321/536/598, 63/68/261/536, 300/444/508, or 298, wherein the amino acid positions are relative to SEQ ID NO: 24.

[0175] In some embodiments, the polypeptide sequence of the recombinant reverse transcriptase comprises at least a substitution or substitution set 454A/508L, 536E/574Q, 309P, 49G/173A/309P/331E, 90I/331E, 63L/90I/309P/574D/650G, 90I/173A/209A/210L/321A/574D/598S, 508L/519P, 49G/63L/90I/216R/309P/321A/536E/574D, 49G/114K/307N/309P/536E, 307K/321A/536E/574D/650G, 309P/331E/536E/574Q/598S/650G, 173A/331E/536E/574D/598S, 49G/300I/403H, 74K/242A, 242A/298E/508L/662R, 260G/509E, 102C/370G/509E, 49G/173A/216R/349G/536E/598S, 49G/114K/216R/307K/309P/331E, 49G/90I/173A/216R/307K, 63P/68S/81K/167Y/314A/447G/574Q, 49G/210L/307K/309P/321A/536E/574D/650G, 63L/90I/307K/321A/331E/537W/598S, 370G/464L/465S/509E/554T/576I, 49G/114K/173A/216R/321A/574D/598S, 90I/216R/321A/650G, 574D/650G, 49G/209A/210L/307K/309P/536E/598S, 216R/536E/574Q, 49G/173A/210L/309P/321A/536E/598S, 331E/536E/598S, 321A/574D, 173A/321A/331E/349G/574D, 49G/307K/536E, 216R/309P/574D/650G, 94L/370G/474A/576I, 90I/209A/210L/309P/321A/574D, 49G/63L/90I/173A, 298E, 49G/300I/454A/662R, 68S/811K/167Y/298R/536N, 49G/454A, 81K, 49G/114K/173A/309P/349G/536E/574D/650G, 167Y/261N/303Q/536N, 18E/102C/554T, 171L/173A/307K/331E/536E, 173A/216R/536E, 18E/370G/464L/509E, 49G/114K, 90I/216R/309P/536G/574D, 444L, 90I/321A/349G/536G/598S/650G, 49G/163P/309P/321A/536E/574D/650G, 49G/63L/90I/173A/307K/331E/536E/598S/650G, 68S/81K/167Y/258T/447G/466K/536N, 90I/331E/574D, 49G/321A, 94L/509E, 90I/173A/321A/536E, 167Y/298R/447G/466K, 173A/216R/307K/309P/536E, 216R/321A, 49G/90I/173A/209A/309P/331E, 261N/298R/303Q/447R/574Q, 171P/298E/444L/519P, 90I/536E/574D/598S/650G, 49G/63L/90I/210L/307K/321A/598S/650G, 90I/216R/307K/536E/574D, 18E/94L/102C/260G/370G/464L/554T, 18E/423R/465S/474A, 167Y/261N/447G/536G, 114K/173A/209A/210L, 307K/309P/536E/574D/598S, 102C/260G/370G/576I, 574D, 173A/209A/210L/307K/536E, 216R/309P/536E, 349G, 447L/536A/606Q, 310R/454A/479D/519P/662R, 49G/90I/209A/598S, 314K/536N, 171P/300I/454A/479D/508L/662R, 171P/242A/300I/508L/662R, 49G/331E/536E, 173A/216R/309P/536E/574D/598S, 536E/598S, 167Y/261N/298R/303Q/447R/466K/574Q, 173A/536E/598S, 49G/114K/309P/536E/574D/598S, 49G/114K/309P/349G/536E, 63P/68S/81K/303Q/466K, 63L/90I/209A/216R/307K/309P/321A/349G/536E/574D/598S/650G, 216R, 173A/210L/307K/598S/650G, 25E/102C/370G/423R, 68S/261N/298R/303Q, 423R/474A, 94L/423R/474A/554T/576I, 63P/298R/447R/574Q, 49G/63L/90I/173A/307K/321A/331E/574D/595N/650G, 49G/90I/536E/574D, 508L, 63P/81K/167Y/258I/261N/298R/303Q/447G, 114K/331E, 212N/298E/583K/606K, 49G/173A/536E/574Q, 49G/242A/298E/300I/310R/444L/454A/479D, 49G/309P/321A/536E/598S, 63P/68S/261N/536G, 300I/444L/508L, or 298R, wherein the amino acid positions are relative to SEQ ID NO: 24.

[0176] In some embodiments, the polypeptide sequence of the recombinant reverse transcriptase comprises at least a substitution or substitution set N454A/H508L, D536E/E574Q, A309P, A49G/H173A/A309P/T331E, V90I/T331E, Q63LN90I/A309P/E574D/H650G, V90I/H173A/T209A/I210L/F321A/E574D/Y598S, H508L/K519P, A49G/Q63L/V90I/H216R/A309P/F321A/D536E/E574D, A49G/R114K/T307N/A309P/D536E, T307K/F321A/D536E/E574D/H650G, A309P/T331E/D536E/E574Q/Y598S/H650G, H173A/T331E/D536E/E574D/Y598S, A49GN300I/P403H, R74K/G242A, G242A/K298E/H508L/Q662R, S260G/Q509E, V102C/A370G/Q509E, A49G/H173A/H216R/A349G/D536E/Y598S, A49G/R114K/H216R/T307K/A309P/T331E, A49G/V90I/H173A/H216R/T307K, Q63P/A68S/E81K/F167Y/E314A/I447G/E574Q, A49G/I210L/T307K/A309P/F321A/D536E/E574D/H650G, Q63LN90I/T307K/F321A/T331E/G537W/Y598S, A370G/M464L/T465S/Q509E/D554T/M576I, A49G/R114K/H173A/H216R/F321A/E574D/Y598S, V90I/H216R/F321A/H650G, E574D/H650G, A49G/T209A/I210L/T307K/A309P/D536E/Y598S, H216R/D536E/E574Q, A49G/H173A/I210L/A309P/F321A/D536E/Y598S, I331E/D536E/Y598S, F321A/E574D, H173A/F321A/T331E/A349G/E574D, A49G/T307K/D536E, H216R/A309P/E574D/H650G, I94L/A370G/S474A/M576I, V90I/T209A/I210L/A309P/F321A/E574D, A49G/Q63LN90I/H173A, K298E, A49G/V300I/N454A/Q662R, A68S/E81K/F167Y/K298R/D536N, A49G/N454A, E81K, A49G/R114K/H173A/A309P/A349G/D536E/E574D/H650G, F167Y/D261N/I303Q/D536N, D18E/V102C/D554T, R171L/H173A/T307K/T331E/D536E, H173A/H216R/D536E, D18E/A370G/M464L/Q509E, A49G/R114K, V90I/H216R/A309P/D536G/E574D, I444L, V90I/F321A/A349G/D536G/Y598S/H650G, A49G/L163P/A309P/F321A/D536E/E574D/H650G, A49G/Q63L/V90I/H173A/T307K/T331E/D536E/Y598S/H650G, A68S/E81K/F167Y/E258T/I447G/N466K/D536N, V90I/T331E/E574D, A49G/F321A, I94L/Q509E, V90I/H173A/F321A/D536E, F167Y/K298R/I447G/N466K, H173A/H216R/T307K/A309P/D536E, H216R/F321A, A49GN90I/H173A/T209A/A309P/T331E, D261N/K298R/I303Q/I447R/E574Q, R171P/K298E/I444L/K519P, V90I/D536E/E574D/Y598S/H650G, A49G/Q63L/V90I/I210L/T307K/F321A/Y598S/H650G, V90I/H216R/T307K/D536E/E574D, D18E/I94L/V102C/S260G/A370G/M464L/D554T, D18E/K423R/T465S/S474A, F167Y/D261N/I447G/D536G, R114K/H173A/T209A/I210L, T307K/A309P/D536E/E574D/Y598S, V102C/S260G/A370G/M576I, E574D, H173A/T209A/I210L/T307K/D536E, H216R/A309P/D536E, A349G, I447L/D536A/H606Q, K310R/N454A/E479D/K519P/Q662R, A49GN90I/T209A/Y598S, E314K/D536N, R171P/V300I/N454A/E479D/H508L/Q662R, R171P/G242AN300I/H508L/Q662R, A49G/T331E/D536E, H173A/H216R/A309P/D536E/E574D/Y598S, D536E/Y598S, F167Y/D261N/K298R/I303Q/I447R/N466K/E574Q, H173A/D536E/Y598S, A49G/R114K/A309P/D536E/E574D/Y598S, A49G/R114K/A309P/A349G/D536E, Q63P/A68S/E81K/I303Q/N466K, Q63LN90I/T209A/H216R/T307K/A309P/F321A/A349G/D536E/E574D/Y598S/H650G, H216R, H173A/I210L/T307K/Y598S/H650G, S25E/V102C/A370G/K423R, A68S/D261N/K298R/I303Q, K423R/S474A, 194L/K423R/S474A/D554T/M576I, Q63P/K298R/I447R/E574Q, A49G/Q63L/V90I/H173A/T307K/F321A/T331E/E574D/D595N/H650G, A49G/V90I/D536E/E574D, H508L, Q63P/E81K/F167Y/E258T/D261N/K298R/I303Q/1447G, R114K/T331E, D212N/K298E/R583K/H606K, A49G/H173A/D536E/E574Q, A49G/G242A/K298E/V300I/K310R/I444L/N454A/E479D, A49G/A309P/F321A/D536E/Y598S, Q63P/A68S/D261N/D536G, V300I/I444L/H508L, or K298R, wherein the amino acid positions are relative to the reference sequence of SEQ ID NO: 24.

[0177] In some embodiments, the recombinant reverse transcriptase comprises a polypeptide sequence having at least 75%, 80%, 81%, 82%, 83%, 84%, 85%, 86%, 87%, 88%, 89%, 90%, 91%, 92%, 93%, 94%, 95%, 96%, 97%, 98%, 99%, or more sequence identity to a reference sequence corresponding to residues 12 to 687 of SEQ ID NO: 94, or to a reference sequence corresponding to SEQ ID NO: 94, wherein the polypeptide sequence comprises one or more substitutions relative to the reference sequence corresponding to residues 12 to 687 of SEQ ID NO: 94, or to the reference sequence corresponding to SEQ ID NO: 94.

[0178] In some embodiments, the polypeptide sequence of the recombinant reverse transcriptase comprises at least a substitution or substitution set at amino acid position 134, 74, 83, 319, 92, 329, 343, 311, 338, 196, 69, 72, 294, 83, 134, 130, 305, 319, 113, 297, 319, 114, 308, 309, 342, 205, 212, 199, 83, 303, 309, 78, 113, 132, 311, 119, 83, 98, 314, 129, 343, 196, 74, 356, 89, 212, 444/508/509/574, 63/260/298/300/331/444/509, 63/90/209/444/508/574, 298/444/509, 63/90/508/509/574/595, 83, 311, 89, 130, 178, or 118, wherein the amino acid positions are relative to the reference sequence of SEQ ID NO: 94.

[0179] In some embodiments, the polypeptide sequence of the recombinant reverse transcriptase comprises at least a substitution or substitution set 134P, 74P, 83A, 319G, 92T, 329S, 343A, 311P, 338V, 196C, 69R, 72M, 294Q, 83W, 134F, 130S, 305P, 319S, 113T, 297W, 319C, 114G, 308G, 309E, 342W, 205M, 212K, 199L, 83C, 303G, 309T, 78V, 113G, 132F, 311I, 119Y, 83E, 98S, 314M, 129L, 343V, 196H, 74M, 356P, 89A, 212V, 444L/508L/509E/574D, 63L/260G/298R/300I/331E/444L/509E, 63L/90I/209A/444L/508L/574Q, 298R/444L/509E, 63L/90I/508L/509E/574Q/595N, 83R, 311A, 89M, 130R, 178L, or 118R, wherein the amino acid positions are relative to the reference sequence of SEQ ID NO: 94.

[0180] In some embodiments, the polypeptide sequence of the recombinant reverse transcriptase comprises at least a substitution or substitution set V134P, R74P, Q83A, A319G, R92T, F329S, K343A, Q311P, P338V, T196C, T69R, S72M, E294Q, Q83W, V134F, V1305, A305P, A319S, V113T, K297W, A319C, R114G, T308G, A309E, E342W, K205M, D212K, R199L, Q83C, 1303G, A309T, L78V, V113G, K132F, Q311I, N119Y, Q83E, 198S, E314M, E129L, K343V, T196H, R74M, F356P, H89A, D212V, I444L/H508L/Q509E/E574D, Q63L/S260G/K298RN300I/T331E/I444L/Q509E, Q63L/V90I/T209A/I444L/H508L/E574Q, K298R/I444L/Q509E, Q63L/V90I/H508L/Q509E/E574Q/D595N, Q83R, Q311A, H89M, V130R, P178L, or T118R, wherein the amino acid positions are relative to the reference sequence of SEQ ID NO: 94.

[0181] In some embodiments, the recombinant reverse transcriptase comprises a polypeptide sequence having at least 75%, 80%, 81%, 82%, 83%, 84%, 85%, 86%, 87%, 88%, 89%, 90%, 91%, 92%, 93%, 94%, 95%, 96%, 97%, 98%, 99%, or more sequence identity to a reference sequence corresponding to residues 12 to 687 of SEQ ID NO: 352, or to a reference sequence corresponding to SEQ ID NO: 352, wherein the polypeptide sequence comprises one or more substitutions relative to the reference sequence corresponding to residues 12 to 687 of SEQ ID NO: 352, or to the reference sequence corresponding to SEQ ID NO: 352.

[0182] In some embodiments, the polypeptide sequence of the recombinant reverse transcriptase comprises at least a substitution or substitution set at amino acid position 309/342, 309, 129/298, 509/574, 85, 98/119/129/132/196/298, 98/298/317/343/356, 205/212/298/309/319/342/509, 444, 78/132/314, 78/83/98, 78/83/119/132/196/444, 78/83/298, 78/83/298/509, 78/83/298/356, 78/298/444, 119/129/132, 178/298/303/331/338/508, 311/314, 63/297/303/305/444, 63/178/209/260/574, 63/300/338, 83/294, 83/92/298/343/574, 83/92/134/444/574, 83/196/329/343, 83/196/298/509, 83/134/196/294/298/305/311/319/329/343/444/574, 83, 83/309, 83/319/342/509, 83/205/444, 83/444, 83/114, 83/114/309/509, 83/114/298/319, 83/199/212/298/309/319/444/639, 83/199/509, 83/298, 83/298/342, 83/308/309/595/638, 83/113/114/205/212, 83/130/298/444, 114/309, 114/309/509, 114/212/309/342/639, 114/205/444, 114/298, 114/130/319/444, 114/130/212/298/342, 114/130/298/309, 199/309, 199/205/444, 298, 298/342, 298/509, 298/343/444/595, 74, 74/129/298/444, 74/83/129/132/212/509, 74/83/92/298/343/509, 74/83/134/294/298/574, 74/83/444/509, 74/298/329/444/574, 74/92/196/294/329, 92/298/509, 72, 72/294/311/329/343/444, 72/294/298/444, 72/294/298/311/329/444, 72/509, 72/83/298/343/444, 72/74/294/298/444, 72/74/83/319/329/509, 72/74/83/84/444, 72/74/83/134/196/294/298, 72/74/298/509, 72/74/92/294/298/329, 72/74/92/298, 72/74/92/134/298/343/444, 72/74/134/196/298/319/329/509, 72/196/311/329/574, 72/134/196/298, 118/178/338/444, 69/89/178/303/305/338/444/574, 113, 113/178/260, 113/309, 113/212/309, 113/342, 113/114, 113/114/212, 113/114/205/319/342, 113/114/298/342, 113/114/130, 113/298, 113/298/309/444, 130/205/333/444, 134, 134/294/444/509, or combinations thereof, wherein the amino acid positions are relative to the reference sequence of SEQ ID NO: 352.

[0183] In some embodiments, the polypeptide sequence of the recombinant reverse transcriptase comprises at least a substitution or substitution set 309E/342W, 309T, 129L/298K, 509Q/574Q, 85R, 98S/119Y/129L/132F/196H/298K, 98S/298K/317C/343V/356P, 205M/212K/298K/309E/319S/342W/509Q, 444I, 78V/132F/314M, 78V/83E/98S, 78V/83E/119Y/132F/196H/444I, 78V/83E/298K, 78V/83E/298K/509Q, 78V/83E/298K/356P, 78V/298K/444I, 119Y/129L/132F, 178L/298K/303G/331E/338V/508L, 311I/314M, 63L/297W/303G/305P/444I, 63L/178L/209A/260G/574Q, 63L/300I/338V, 83A/294Q, 83A/92T/298K/343A/574Q, 83A/92T/134P/444I/574Q, 83A/196C/329S/343A, 83A/196C/298K/509Q, 83A/134F/196C/294Q/298K/3055/311P/319G/329S/343A/444I/574Q, 83C, 83C/309T, 83C/319S/342W/509Q, 83C/205M/444I, 83C/444I, 83C/114G, 83C/114G/309T/509Q, 83C/114G/298K/319C, 83C/199L/212K/298K/309E/319C/444I/639H, 83C/199L/509Q, 83C/298K, 83C/298K/342W, 83C/308G/309E/595N/638H, 83C/113T/114G/205M/212K, 83C/130S/298K/444I, 114G/309E, 114G/309E/509Q, 114G/212K/309E/342W/639H, 114G/205M/444I, 114G/298K, 114G/130S/319S/444I, 114G/130S/212K/298K/342W, 114G/130S/298K/309E, 199L/309T, 199L/205M/444I, 298K, 298K/342W, 298K/509Q, 298K/343A/444I/595N, 74M, 74M/129L/298K/444I, 74M/83E/129L/132F/212V/509Q, 74P/83A/92T/298K/343A/509Q, 74P/83A/134P/294Q/298K/574Q, 74P/83W/444I/509Q, 74P/298K/329S/444I/574Q, 74P/92T/196C/294Q/329S, 92T/298K/509Q, 72M, 72M/294Q/311A/329S/343A/444I, 72M/294Q/298K/444I, 72M/294Q/298K/311A/329S/444I, 72M/509Q, 72M/83A/298K/343A/444I, 72M/74P/294Q/298K/444I, 72M/74P/83A/319G/329S/509Q, 72M/74P/83A/84N/444I, 72M/74P/83A/134F/196C/294Q/298K, 72M/74P/298K/509Q, 72M/74P/92T/294Q/298K/329S, 72M/74P/92T/298K, 72M/74P/92T/134P/298K/343A/444I, 72M/74P/134F/196C/298K/319G/329S/509Q, 72M/196C/311A/329S/574Q, 72M/134P/196C/298K, 118R/178L/338V/444I, 69R/89A/178L/303G/305P/338V/444I/574Q, 113G, 113G/178L/260G, 113T/309E, 113T/212K/309E, 113T/342W, 113I/114G, 113T/114G/212K, 113T/114G/205M/319C/342W, 113T/114G/298K/342W, 113T/114G/130S, 113T/298K, 113T/298K/309E/444I, 130S/205M/333V/444I, 134P, or 134P/294Q/444I/509Q, wherein the amino acid positions are relative to the reference sequence of SEQ ID NO:352.

[0184] In some embodiments, the polypeptide sequence of the recombinant reverse transcriptase comprises at least a substitution or substitution set A309E/E342W, A309T, E129L/R298K, E509Q/E574Q, G85R, 198S/N119Y/E129L/K132F/T196H/R298K, 198S/R298K/G317C/K343V/F356P, K205M/D212K/R298K/A309E/A319S/E342W/E509Q, L444I, L78V/K132F/E314M, L78V/Q83E/I98S, L78V/Q83E/N119Y/K132F/T196H/L444I, L78V/Q83E/R298K, L78V/Q83E/R298K/E509Q, L78V/Q83E/R298K/F356P, L78V/R298K/L444I, N119Y/E129L/K132F, P178L/R298K/I303G/T331E/P338V/H508L, Q3111/E314M, Q63L/K297W/I303G/A305P/L444I, Q63L/P178L/T209A/S260G/E574Q, Q63L/V300I/P338V, Q83A/E294Q, Q83A/R92T/R298K/K343A/E574Q, Q83A/R92TN134P/L444I/E574Q, Q83A/T196C/F329S/K343A, Q83A/T196C/R298K/E509Q, Q83A/V134F/T196C/E294Q/R298K/A305S/Q311P/A319G/F329S/K343A/L444I/E574Q, Q83C, Q83C/A309T, Q83C/A319S/E342W/E509Q, Q83C/K205M/L444I, Q83C/L444I, Q83C/R114G, Q83C/R114G/A309T/E509Q, Q83C/R114G/R298K/A319C, Q83C/R199L/D212K/R298K/A309E/A319C/L444I/P639H, Q83C/R199L/E509Q, Q83C/R298K, Q83C/R298K/E342W, Q83C/T308G/A309E/D595N/L638H, Q83CN113T/R114G/K205M/D212K, Q83CN130S/R298K/L444I, R114G/A309E, R114G/A309E/E509Q, R114G/D212K/A309E/E342W/P639H, R114G/K205M/L444I, R114G/R298K, R114GN130S/A319S/L444I, R114GN130S/D212K/R298K/E342W, R114GN130S/R298K/A309E, R199L/A309T, R199L/K205M/L444I, R298K, R298K/E342W, R298K/E509Q, R298K/K343A/L444I/D595N, R74M, R74M/E129L/R298K/L444I, R74M/Q83E/E129L/K132F/D212V/E509Q, R74P/Q83A/R92T/R298K/K343A/E509Q, R74P/Q83AN134P/E294Q/R298K/E574Q, R74P/Q83W/L444I/E509Q, R74P/R298K/F329S/L444I/E574Q, R74P/R92T/T196C/E294Q/F329S, R92T/R298K/E509Q, S72M, S72M/E294Q/Q311A/F329S/K343A/L444I, S72M/E294Q/R298K/L444I, S72M/E294Q/R298K/Q311A/F329S/L444I, S72M/E509Q, S72M/Q83A/R298K/K343A/L444I, S72M/R74P/E294Q/R298K/L444I, S72M/R74P/Q83A/A319G/F329S/E509Q, S72M/R74P/Q83A/E84N/L444I, S72M/R74P/Q83AN134F/T196C/E294Q/R298K, S72M/R74P/R298K/E509Q, S72M/R74P/R92T/E294Q/R298K/F329S, S72M/R74P/R92T/R298K, S72M/R74P/R92T/V134P/R298K/K343A/L444I, S72M/R74P/V134F/T196C/R298K/A319G/F329S/E509Q, S72M/T196C/Q311A/F329S/E574Q, S72M/V134P/T196C/R298K, T118R/P178L/P338V/L444I, T69R/H89A/P178L/I303G/A305P/P338V/L444I/E574Q, V113G, V113G/P178L/S260G, V113T/A309E, V113T/D212K/A309E, V113T/E342W, V113T/R114G, V113T/R114G/D212K, V113T/R114G/K205M/A319C/E342W, V113T/R114G/R298K/E342W, V113T/R114G/V130S, V113T/R298K, V113T/R298K/A309E/L444I, V130S/K205M/A333V/L444I, V134P, or V134P/E294Q/L444I/E509Q, wherein the amino acid positions are relative to the reference sequence of SEQ ID NO:352.

[0185] In some embodiments, the recombinant reverse transcriptase comprises a polypeptide sequence comprising a substitution in at least one amino acid position provided in Table 4.1, 5.1, 6.1, and 7.1, wherein the substitution is relative to the reference sequence corresponding to residues 12 to 687 of SEQ ID NO: 2, 24, 94 or 352, or to the reference sequence of SEQ ID NO: 2, 24, 94 or 352.

[0186] In some embodiments, the recombinant reverse transcriptase comprises a polypeptide sequence comprising at least one substitution provided in Table 4.1, 5.1, 6.1, and 7.1, wherein the substitution is relative to the reference sequence comprising residues 12 to 687 of SEQ ID NO: 2, 24, 94 or 352, or to the reference sequence of SEQ ID NO: 2, 24, 94 or 352.

[0187] In some embodiments, the recombinant reverse transcriptase comprises a polypeptide sequence comprising at least one substitution or substitution set provided in Table 4.1, 5.1, 6.1, and 7.1, wherein the substitution or substitution set is relative to the reference sequence comprising residues 12 to 687 of SEQ ID NO: 2, 24, 94 or 352, or to the reference sequence of SEQ ID NO: 2, 24, 94 or 352.

[0188] In some embodiments, a recombinant reverse transcriptase comprises a polypeptide sequence having at least 75%, 80%, 85%, 86%, 87%, 88%, 89%, 90%, 91%, 92%, 93%, 94%, 95%, 96%, 97%, 98%, 99% or more sequence identity to a reference sequence corresponding to residues 12 to 687 of an even numbered SEQ ID NO. set forth in Table 4.1, 5.1, 6.1, and 7.1, or to a reference sequence of an even numbered SEQ ID NO. set forth in Table 4.1, 5.1, 6.1, and 7.1. In some embodiments, the recombinant reverse transcriptase comprises a polypeptide sequence comprising residues 12 to 687 of an even numbered SEQ ID NO. set forth in Table 4.1, 5.1, 6.1, and 7.1, or a polypeptide sequence comprising an even numbered SEQ ID NO. set forth in Table 4.1, 5.1, 6.1, and 7.1.

[0189] In some embodiments, a recombinant reverse transcriptase comprises a polypeptide sequence comprising at least 75%, 80%, 85%, 86%, 87%, 88%, 89%, 90%, 91%, 92%, 93%, 94%, 95%, 96%, 97%, 98%, 99% or more sequence identity to a reference sequence corresponding to residues 12 to 687 of SEQ ID NO: 4, 6, 8, 10, 12, 14, 16, 18, 20, 22, 24, 26, 28, 30, 32, 34, 36, 38, 40, 42, 44, 46, 48, 50, 52, 54, 56, 58, 60, 62, 64, 66, 68, 70, 72, 74, 76, 78, 80, 82, 84, 86, 88, 90, 92, 94, 96, 98, 100, 102, 104, 106, 108, 110, 112, 114, 116, 118, 120, 122, 124, 126, 128, 130, 132, 134, 136, 138, 140, 142, 144, 146, 148, 150, 152, 154, 156, 158, 160, 162, 164, 166, 168, 170, 172, 174, 176, 178, 180, 182, 184, 186, 188, 190, 192, 194, 196, 198, 200, 202, 204, 206, 208, 210, 212, 214, 216, 218, 220, 222, 224, 226, 228, 230, 232, 234, 236, 238, 240, 242, 244, 246, 248, 250, 252, 254, 256, 258, 260, 262, 264, 266, 268, 270, 272, 274, 276, 278, 280, 282, 284, 286, 288, 290, 292, 294, 296, 298, 300, 302, 304, 306, 308, 310, 312, 314, 316, 318, 320, 322, 324, 326, 328, 330, 332, 334, 336, 338, 340, 342, 344, 346, 348, 350, 352, 354, 356, 358, 360, 362, 364, 366, 368, 370, 372, 374, 376, 378, 380, 382, 384, 386, 388, 390, 392, 394, 396, 398, 400, 402, 404, 406, 408, 410, 412, 414, 416, 418, 420, 422, 424, 426, 428, 430, 432, 434, 436, 438, 440, 442, 444, 446, 448, 450, 452, 454, 456. 458, 460. 462, 464, 466, 468, 470, 472, 474, 476, 478, 480, 482, 484, 486, 488, 490, 492, 494, 496, 498, 500, 502, 504, 506, 508, 510, 512, 514, 516, 518, 520, 522, 524, 526, 528, 530, 532, 534, 536, 538, 540, 542, 544, 546, 548, 550, 552, 554, 556, 558, 560, 562, 564, or 566.

[0190] In some embodiments, the recombinant reverse transcriptase comprises a polypeptide sequence comprising residues 12 to 687 of SEQ ID NO: 4, 6, 8, 10, 12, 14, 16, 18, 20, 22, 24, 26, 28, 30, 32, 34, 36, 38, 40, 42, 44, 46, 48, 50, 52, 54, 56, 58, 60, 62, 64, 66, 68, 70, 72, 74, 76, 78, 80, 82, 84, 86, 88, 90, 92, 94, 96, 98, 100, 102, 104, 106, 108, 110, 112, 114, 116, 118, 120, 122, 124, 126, 128, 130, 132, 134, 136, 138, 140, 142, 144, 146, 148, 150, 152, 154, 156, 158, 160, 162, 164, 166, 168, 170, 172, 174, 176, 178, 180, 182, 184, 186, 188, 190, 192, 194, 196, 198, 200, 202, 204, 206, 208, 210, 212, 214, 216, 218, 220, 222, 224, 226, 228, 230, 232, 234, 236, 238, 240, 242, 244, 246, 248, 250, 252, 254, 256, 258, 260, 262, 264, 266, 268, 270, 272, 274, 276, 278, 280, 282, 284, 286, 288, 290, 292, 294, 296, 298, 300, 302, 304, 306, 308, 310, 312, 314, 316, 318, 320, 322, 324, 326, 328, 330, 332, 334, 336, 338, 340, 342, 344, 346, 348, 350, 352, 354, 356, 358, 360, 362, 364, 366, 368, 370, 372, 374, 376, 378, 380, 382, 384, 386, 388, 390, 392, 394, 396, 398, 400, 402, 404, 406, 408, 410, 412, 414, 416, 418, 420, 422, 424, 426, 428, 430, 432, 434, 436, 438, 440, 442, 444, 446, 448, 450, 452, 454, 456. 458, 460. 462, 464, 466, 468, 470, 472, 474, 476, 478, 480, 482, 484, 486, 488, 490, 492, 494, 496, 498, 500, 502, 504, 506, 508, 510, 512, 514, 516, 518, 520, 522, 524, 526, 528, 530, 532, 534, 536, 538, 540, 542, 544, 546, 548, 550, 552, 554, 556, 558, 560, 562, 564, or 566, wherein the polypeptide sequence has optionally 1, 2, 3, 4, 5, 6, 7, 8, 9, or up to 10 substitutions in the polypeptide sequence.

[0191] In some embodiments, a recombinant reverse transcriptase comprises a polypeptide sequence comprising at least 75%, 80%, 85%, 86%, 87%, 88%, 89%, 90%, 91%, 92%, 93%, 94%, 95%, 96%, 97%, 98%, 99% or more sequence identity to a reference sequence corresponding to SEQ ID NO: 4, 6, 8, 10, 12, 14, 16, 18, 20, 22, 24, 26, 28, 30, 32, 34, 36, 38, 40, 42, 44, 46, 48, 50, 52, 54, 56, 58, 60, 62, 64, 66, 68, 70, 72, 74, 76, 78, 80, 82, 84, 86, 88, 90, 92, 94, 96, 98, 100, 102, 104, 106, 108, 110, 112, 114, 116, 118, 120, 122, 124, 126, 128, 130, 132, 134, 136, 138, 140, 142, 144, 146, 148, 150, 152, 154, 156, 158, 160, 162, 164, 166, 168, 170, 172, 174, 176, 178, 180, 182, 184, 186, 188, 190, 192, 194, 196, 198, 200, 202, 204, 206, 208, 210, 212, 214, 216, 218, 220, 222, 224, 226, 228, 230, 232, 234, 236, 238, 240, 242, 244, 246, 248, 250, 252, 254, 256, 258, 260, 262, 264, 266, 268, 270, 272, 274, 276, 278, 280, 282, 284, 286, 288, 290, 292, 294, 296, 298, 300, 302, 304, 306, 308, 310, 312, 314, 316, 318, 320, 322, 324, 326, 328, 330, 332, 334, 336, 338, 340, 342, 344, 346, 348, 350, 352, 354, 356, 358, 360, 362, 364, 366, 368, 370, 372, 374, 376, 378, 380, 382, 384, 386, 388, 390, 392, 394, 396, 398, 400, 402, 404, 406, 408, 410, 412, 414, 416, 418, 420, 422, 424, 426, 428, 430, 432, 434, 436, 438, 440, 442, 444, 446, 448, 450, 452, 454, 456. 458, 460. 462, 464, 466, 468, 470, 472, 474, 476, 478, 480, 482, 484, 486, 488, 490, 492, 494, 496, 498, 500, 502, 504, 506, 508, 510, 512, 514, 516, 518, 520, 522, 524, 526, 528, 530, 532, 534, 536, 538, 540, 542, 544, 546, 548, 550, 552, 554, 556, 558, 560, 562, 564, or 566.

[0192] In some embodiments, the recombinant reverse transcriptase comprises a polypeptide sequence comprising SEQ ID NO: 4, 6, 8, 10, 12, 14, 16, 18, 20, 22, 24, 26, 28, 30, 32, 34, 36, 38, 40, 42, 44, 46, 48, 50, 52, 54, 56, 58, 60, 62, 64, 66, 68, 70, 72, 74, 76, 78, 80, 82, 84, 86, 88, 90, 92, 94, 96, 98, 100, 102, 104, 106, 108, 110, 112, 114, 116, 118, 120, 122, 124, 126, 128, 130, 132, 134, 136, 138, 140, 142, 144, 146, 148, 150, 152, 154, 156, 158, 160, 162, 164, 166, 168, 170, 172, 174, 176, 178, 180, 182, 184, 186, 188, 190, 192, 194, 196, 198, 200, 202, 204, 206, 208, 210, 212, 214, 216, 218, 220, 222, 224, 226, 228, 230, 232, 234, 236, 238, 240, 242, 244, 246, 248, 250, 252, 254, 256, 258, 260, 262, 264, 266, 268, 270, 272, 274, 276, 278, 280, 282, 284, 286, 288, 290, 292, 294, 296, 298, 300, 302, 304, 306, 308, 310, 312, 314, 316, 318, 320, 322, 324, 326, 328, 330, 332, 334, 336, 338, 340, 342, 344, 346, 348, 350, 352, 354, 356, 358, 360, 362, 364, 366, 368, 370, 372, 374, 376, 378, 380, 382, 384, 386, 388, 390, 392, 394, 396, 398, 400, 402, 404, 406, 408, 410, 412, 414, 416, 418, 420, 422, 424, 426, 428, 430, 432, 434, 436, 438, 440, 442, 444, 446, 448, 450, 452, 454, 456. 458, 460. 462, 464, 466, 468, 470, 472, 474, 476, 478, 480, 482, 484, 486, 488, 490, 492, 494, 496, 498, 500, 502, 504, 506, 508, 510, 512, 514, 516, 518, 520, 522, 524, 526, 528, 530, 532, 534, 536, 538, 540, 542, 544, 546, 548, 550, 552, 554, 556, 558, 560, 562, 564, or 566, wherein the polypeptide optionally has 1, 2, 3, 4, 5, 6, 7, 8, 9, or up to 10 substitutions in the polypeptide sequence.

[0193] In some embodiments, the recombinant reverse transcriptase polypeptide has 1, 2, 3, 4, or up to 5 substitutions in the polypeptide sequence. In some embodiments, the recombinant reverse transcriptase polypeptide has 1, 2, 3, or 4 substitutions in the polypeptide sequence. In some embodiments, the substitutions comprises non-conservative or conservative substitutions. In some embodiments, the substitutions comprises conservative substitutions. In some embodiments, the substitutions comprises non-conservative substitutions. In some embodiments, guidance on non-conservative and conservative substitutions are provided by the variants disclosed herein, including in the Examples.

[0194] In some embodiments, the recombinant reverse transcriptase comprises a polypeptide sequence comprising residues 12 to 687 of SEQ ID NO: 2, 24, 94, or 352, wherein the polypeptide sequence has optionally 1, 2, 3, 4, 5, 6, 7, 8, 9, or up to 10 substitutions in the polypeptide sequence. In some embodiments, the recombinant reverse transcriptase comprises a polypeptide sequence comprising SEQ ID NO: 2, 24, 94, or 352, wherein the polypeptide sequence has optionally 1, 2, 3, 4, 5, 6, 7, 8, 9, or up to 10 substitutions in the polypeptide sequence. In some embodiments, the recombinant reverse transcriptase includes 1, 2, 3, 4, up to 5 substitutions in the polypeptide sequence. In some embodiments, the recombinant reverse transcriptase includes 1, 2, 3, or 4 substitutions in the polypeptide sequence.

[0195] It will be apparent that the description herein, including the Examples and Tables, provide structural information correlating specific amino acid sequence features with the functional activity of the recombinant reverse transcriptase polypeptides. This structure-function correlation information is provided in the form of specific amino acid residue differences relative to the reference engineered polypeptide of SEQ ID NO: 2, 24, 94 and 352, as well as associated experimentally determined activity data for the exemplary recombinant reverse transcriptase polypeptides. Such information provides guidance and information on substitutions implemented in preparing variants of recombinant reverse transcriptase.

[0196] In some embodiments, the recombinant reverse transcriptase of the present disclosure has DNA polymerase activity. In particular, the DNA polymerase activity uses a target RNA as a template. As further discussed herein, the target RNA includes, among others, messenger RNA (mRNA), non-coding RNA (ncRNA), micro-RNA (miRNA), bacterial RNA, fungal RNA, and viral RNA. In some embodiments, the recombinant reverse transcriptase of the present disclosure has DNA polymerase activity, wherein the DNA polymerase activity uses a target DNA template.

[0197] In some embodiments, the recombinant reverse transcriptase of the present disclosure has at least one improved property as compared to a reference reverse transcriptase. In some embodiments, the recombinant reverse transcriptases have one or more of improved property selected from increased DNA product yield, increased thermostability, increased salt tolerance, increased processivity, increased fidelity, increased RNA template sensitivity, and/or increased product yield in a coupled PCR reaction with a DNA polymerase (e.g., RT-PCR) compared to a reference reverse transcriptase. In some embodiments, the reference reverse transcriptase has a sequence corresponding to residues 12 to 687 of SEQ ID NO: 2, 24, 94, or 352. In some embodiments, the reference reverse transcriptase has the sequence corresponding to residues 12 to 687 of SEQ ID NO: 2, or the sequence corresponding to SEQ ID NO: 2.

[0198] In some embodiments, the recombinant reverse transcriptase polypeptide described herein is an isolated composition. In some embodiments, the recombinant reverse transcriptase polypeptide described herein is a purified composition, as further discussed herein.

[0199] In some embodiments, the present disclosure further provides functional fragments or biologically active fragments of recombinant reverse transcriptase polypeptides described herein. Thus, for each and every embodiment herein of a recombinant reverse transcriptase, a functional fragment or biologically active fragment of the recombinant reverse transcriptase is provided herewith. In some embodiments, a functional fragment or biologically active fragments of a recombinant reverse transcriptase comprises at least about 90%, at least about 95%, at least about 96%, at least about 97%, at least about 98%, or at least about 99% of the activity of the recombinant reverse transcriptase polypeptide from which it was derived (i.e., the parent recombinant reverse transcriptase).

[0200] In some embodiments, functional fragments or biologically active fragments comprise at least about 90%, at least about 91%, at least about 92%, at least about 93%, at least about 94%, at least about 95%, at least about 96%, at least about 97%, at least about 98%, or at least about 99% of the parent sequence of the recombinant reverse transcriptase. In some embodiments the functional fragment will be truncated by less than 5, less than 10, less than 15, less than 10, less than 25, less than 30, less than 35, less than 40, less than 45, and less than 50 amino acids.

[0201] In some embodiments, a functional fragment of a recombinant reverse transcriptase comprises at least 90%, 91%, 92%, 93%, 94%, 95%, 96%, 97%, 98%, or 99% of the parent sequence of the recombinant reverse transcriptase. In some embodiments the functional fragment will be truncated by less than 5, less than 10, less than 15, less than 10, less than 25, less than 30, less than 35, less than 40, less than 45, less than 50, less than 55, less than 60, less than 65, or less than 70 amino acids.

[0202] In some embodiments, the functional fragments or biologically active fragments of the recombinant reverse transcriptase polypeptide described herein include at least a substitution or substitution set in the amino acid sequence of the recombinant reverse transcriptase described herein. Accordingly, in some embodiments, the functional fragments or biologically active fragments of the recombinant reverse transcriptase displays the enhanced or improved property associated with the substitution or substitution set in the parent recombinant reverse transcriptase.

### Polynucleotides Encoding Engineered Polypeptides, Expression Vectors and Host Cells

[0203] In another aspect, the present disclosure provides recombinant polynucleotides encoding the recombinant reverse transcriptase polypeptides described herein. In some embodiments, the recombinant polynucleotides are operatively linked to one or more heterologous regulatory sequences that control gene expression to create a recombinant polynucleotide capable of expressing the polypeptide. In some embodiments, expression constructs containing at least one heterologous polynucleotide encoding the recombinant reverse transcriptase polypeptide(s) is introduced into appropriate host cells to express the corresponding DNA polymerase polypeptide(s).

[0204] As will be apparent to the skilled artisan, availability of a protein sequence and the knowledge of the codons corresponding to the various amino acids provide a description of all the polynucleotides capable of encoding the subject polypeptides. The degeneracy of the genetic code, where the same amino acids are encoded by alternative or synonymous codons, allows an extremely large number of nucleic acids to be made, all of which encode a recombinant reverse transcriptase polypeptide. Thus, the present invention provides methods and compositions for the production of each and every possible variation of recombinant reverse transcriptase polynucleotides that could be made that encode the reverse transcriptase polypeptides described herein by selecting combinations based on the possible codon choices, and all such variations are to be considered specifically disclosed for any polypeptide described herein, including the amino acid sequences presented in the Examples (e.g., in Table 4.1, 5.1, 6.1, and 7.1) and in the Sequence Listing.

[0205] In some embodiments, the codons are preferably optimized for utilization by the chosen host cell for protein production. For example, preferred codons used in bacteria are typically used for expression in bacteria, and preferred codons used in mammalian cells are typically used for expression in mammalian cells. Consequently, codon optimized polynucleotides encoding the recombinant reverse transcriptase polypeptides contain preferred codons at about 40%, 50%, 60%, 70%, 80%, 90%, or greater than 90% of the codon positions in the full length coding region.

[0206] In some embodiments, the recombinant reverse transcriptase polynucleotide encodes an engineered polypeptide having reverse transcriptase activity, wherein the polypeptide comprises an amino acid sequence having at least at least 75%, 80%, 81%, 82%, 83%, 84%, 85%, 86%, 87%, 88%, 89%, 90%, 91%, 92%, 93%, 94%, 95%, 96%, 97%, 98%, 99%, or more sequence identity to a reference sequence corresponding to residues 12 to 687 of SEQ ID NO: 2, 24, 94, or 352, or to a reference sequence corresponding to SEQ ID NO: 2, 24, 94, or 352, wherein the polypeptide sequence comprises one or more substitutions relative to the reference sequence corresponding to residues 12 to 687 of SEQ ID NO: 2, 24, 94, or 352, or to the reference sequence corresponding to SEQ ID NO: 2, 24, 94, or 352, as described herein.

[0207] In some embodiments, the recombinant polynucleotide encodes the recombinant reverse transcriptase comprising a polypeptide acid sequence having at least at least 70%, 75%, 80%, 85%, 86%, 87%, 88%, 89%, 90%, 91%, 92%, 93%, 94%, 95%, 96%, 97%, 98%, or 99% or more sequence identity to a reference sequence corresponding to residues 12 to 687 of SEQ ID NO: 2, or to a reference sequence corresponding to SEQ ID NO: 2, wherein the polypeptide sequence comprises one or more substitutions relative to a reference sequence corresponding to residues 12 to 687 of SEQ ID NO: 2, or to a reference sequence corresponding to SEQ ID NO: 2, as described herein.

[0208] As described above, in some embodiments, the recombinant polynucleotide encodes the recombinant reverse transcriptase comprising a polypeptide acid sequence comprising at least a substitution at amino acid position 18, 25, 49, 63, 68, 69, 72, 74, 78, 81, 83, 84, 85, 89, 90, 92, 94, 98, 102, 113, 114, 118, 119, 129, 130, 132, 134, 163, 167, 171, 173, 178, 196, 199, 205, 209, 210, 212, 216, 242, 258, 260, 261, 266, 294, 297, 298, 300, 303, 305, 307, 308, 309, 310, 311, 314, 317, 319, 321, 329, 331, 333, 338, 342, 343, 349, 356, 370, 403, 444, 447, 454, 464, 465, 466, 474, 479, 508, 509, 519, 536, 537, 554, 574, 576, 583, 595, 598, 606, 638, 639, or 662, or combinations thereof, wherein the amino acid positions are relative to the reference sequence of SEQ ID NO: 2.

[0209] In some embodiments, the recombinant polynucleotide encodes a reverse transcriptase polypeptide comprising a polypeptide sequence comprising at least a substitution at amino acid position 49, 266, 298, 307, 444, 509, or 536, or combinations thereof, wherein the amino acid positions are relative to the reference sequence of SEQ ID NO: 2.

[0210] In some embodiments, the recombinant polynucleotide encodes the reverse transcriptase polypeptide comprising a polypeptide acid sequence comprising at least a substitution or substitution set at amino acid position 114/210/307, 114/309, 49, 63/68/216/258/261, 63/68/216/261, 63/209/314/665, 447/665, 331, 90/307/349, 114/173/331, 266, wherein the amino acid positions are relative to the reference sequence of SEQ ID NO: 2.

[0211] In some embodiments, the recombinant polynucleotide encodes the reverse transcriptase polypeptide comprising a polypeptide acid sequence comprising at least a substitution or substitution set at amino acid position 454/508, 536/574, 309, 49/173/309/331, 90/331, 63/90/309/574/650, 90/173/209/210/321/574/598, 508/519, 49/63/90/216/309/321/536/574, 49/114/307/309/536, 307/321/536/574/650, 309/331/536/574/598/650, 173/331/536/574/598, 49/300/403, 74/242, 242/298/508/662, 260/509, 102/370/509, 49/173/216/349/536/598, 49/114/216/307/309/331, 49/90/173/216/307, 63/68/81/167/314/447/574, 49/210/307/309/321/536/574/650, 63/90/307/321/331/537/598, 370/464/465/509/554/576, 49/114/173/216/321/574/598, 90/216/321/650, 574/650, 49/209/210/307/309/536/598, 216/536/574, 49/173/210/309/321/536/598, 331/536/598, 321/574, 173/321/331/349/574, 49/307/536, 216/309/574/650, 94/370/474/576, 90/209/210/309/321/574, 49/63/90/173, 298, 49/300/454/662, 68/81/167/298/536, 49/454, 81, 49/114/173/309/349/536/574/650, 167/261/303/536, 18/102/554, 171/173/307/331/536, 173/216/536, 18/370/464/509, 49/114, 90/216/309/536/574, 444, 90/321/349/536/598/650, 49/163/309/321/536/574/650, 49/63/90/173/307/331/536/598/650, 68/81/167/258/447/466/536, 90/331/574, 49/321, 94/509, 90/173/321/536, 167/298/447/466, 173/216/307/309/536, 216/321, 49/90/173/209/309/331, 261/298/303/447/574, 171/298/444/519, 90/536/574/598/650, 49/63/90/210/307/321/598/650, 90/216/307/536/574, 18/94/102/260/370/464/554, 18/423/465/474, 167/261/447/536, 114/173/209/210, 307/309/536/574/598, 102/260/370/576, 574, 173/209/210/307/536, 216/309/536, 349, 447/536/606, 310/454/479/519/662, 49/90/209/598, 314/536, 171/300/454/479/508/662, 171/242/300/508/662, 49/331/536, 173/216/309/536/574/598, 536/598, 167/261/298/303/447/466/574, 173/536/598, 49/114/309/536/574/598, 49/114/309/349/536, 63/68/81/303/466, 63/90/209/216/307/309/321/349/536/574/598/650, 216, 173/210/307/598/650, 25/102/370/423, 68/261/298/303, 423/474, 94/423/474/554/576, 63/298/447/574, 49/63/90/173/307/321/331/574/595/650, 49/90/536/574, 508, 63/81/167/258/261/298/303/447, 114/331, 212/298/583/606, 49/173/536/574, 49/242/298/300/310/444/454/479, 49/309/321/536/598, 63/68/261/536, 300/444/508, or 298, wherein the amino acid positions are relative to the reference sequence of SEQ ID NO: 2.

[0212] In some embodiments, In some embodiments, the recombinant polynucleotide encodes the reverse transcriptase polypeptide comprising a polypeptide acid sequence comprising at least a substitution or substitution set at amino acid position 134, 74, 83, 319, 92, 329, 343, 311, 338, 196, 69, 72, 294, 83, 134, 130, 305, 319, 113, 297, 319, 114, 308, 309, 342, 205, 212, 199, 83, 303, 309, 78, 113, 132, 311, 119, 83, 98, 314, 129, 343, 196, 74, 356, 89, 212, 444/508/509/574, 63/260/298/300/331/444/509, 63/90/209/444/508/574, 298/444/509, 63/90/508/509/574/595, 83, 311, 89, 130, 178, or 118, wherein the amino acid positions are relative to the reference sequence of SEQ ID NO: 2.

[0213] In some embodiments, In some embodiments, the recombinant polynucleotide encodes the reverse transcriptase comprising a polypeptide acid sequence comprising at least a substitution or substitution set at amino acid position 309/342, 309, 129, 574, 85, 98/119/129/132/196, 98/317/343/356, 205/212/309/319/342, 78/132/314, 78/83/98, 78/83/119/132/196, 78/83, 78/83/356, 78, 119/129/132, 178/303/331/338/508, 311/314, 63/297/303/305, 63/178/209/260/574, 63/300/338, 83/294, 83/92/343/574, 83/92/134/574, 83/196/329/343, 83/196, 83/134/196/294/305/311/319/329/343/574, 83, 83/309, 83/319/342, 83/205, 83/114, 83/114/309, 83/114/319, 83/199/212/309/319/639, 83/199, 83/342, 83/308/309/595/638, 83/113/114/205/212, 83/130, 114/309, 114/212/309/342/639, 114/205, 114, 114/130/319, 114/130/212/342, 114/130/309, 199/309, 199/205, 342, 343/595, 74, 74/129, 74/83/129/132/212, 74/83/92/343, 74/83/134/294/574, 74/83, 74/329/574, 74/92/196/294/329, 92, 72, 72/294/311/329/343, 72/294, 72/294/311/329, 72/83/343, 72/74/294, 72/74/83/319/329, 72/74/83/84, 72/74/83/134/196/294, 72/74, 72/74/92/294/329, 72/74/92, 72/74/92/134/343, 72/74/134/196/319/329, 72/196/311/329/574, 72/134/196, 118/178/338, 69/89/178/303/305/338/574, 113, 113/178/260, 113/309, 113/212/309, 113/342, 113/114, 113/114/212, 113/114/205/319/342, 113/114/342, 113/114/130, 130/205/333, 134, or 134/294, wherein the amino acid positions are relative to the reference sequence of SEQ ID NO: 2.

[0214] In some embodiments, for each of the foregoing embodiments, the specific amino acid substitutions described herein for the substitution or substitution set can be used for the encoded reverse transcriptase polypeptide.

[0215] In some embodiments, the recombinant polynucleotide encodes the recombinant reverse transcriptase comprising a polypeptide sequence comprising at least a substitution or substitution set 266V/454A/508L, 266V/536E/574Q, 266V/309P, 49G/173A/266V/309P/331E, 90I/266V/331E, 63L/90I/266V/309P/574D/650G, 90I/173A/209A/210L/266V/321A/574D/5985, 266V/508L/519P, 49G/63L/90I/216R/266V/309P/321A/536E/574D, 49G/114K/266V/307N/309P/536E, 266V/307K/321A/536E/574D/650G, 266V/309P/331E/536E/574Q/598S/650G, 173A/266V/331E/536E/574D/598S, 49G/266V/300I/403H, 74K/242A/266V, 242A/266V/298E/508L/662R, 260G/266V/509E, 102C/266V/370G/509E, 49G/173A/216R/266V/349G/536E/598S, 49G/114K/216R/266V/307K/309P/331E, 49G/90I/173A/216R/266V/307K, 63P/68S/81K/167Y/266V/314A/447G/574Q, 49G/210L/266V/307K/309P/321A/536E/574D/650G, 63L/90I/266V/307K/321A/331E/537W/598S, 266V/370G/464L/465S/509E/554T/576I, 49G/114K/173A/216R/266V/321A/574D/598S, 90I/216R/266V/321A/650G, 266V/574D/650G, 49G/209A/210L/266V/307K/309P/536E/598S, 216R/266V/536E/574Q, 49G/173A/210L/266V/309P/321A/536E/5985, 266V/331E/536E/598S, 266V/321A/574D, 173A/266V/321A/331E/349G/574D, 49G/266V/307K/536E, 216R/266V/309P/574D/650G, 94L/266V/370G/474A/576I, 90I/209A/210L/266V/309P/321A/574D, 49G/63L/90I/173A/266V, 266V/298E, 49G/266V/300I/454A/662R, 68S/81K/167Y/266V/298R/536N, 49G/266V/454A, 81K/266V, 49G/114K/173A/266V/309P/349G/536E/574D/650G , 167Y/261N/266V/303Q/536N, 18E/102C/266V/554T, 171L/173A/266V/307K/331E/536E, 173A/216R/266V/536E, 18E/266V/370G/464L/509E, 49G/114K/266V, 90I/216R/266V/309P/536G/574D, 266V/444L, 90I/266V/321A/349G/536G/598S/650G, 49G/163P/266V/309P/321A/536E/574D/650G, 49G/63L/90I/173A/266V/307K/331E/536E/598S/650G, 68S/81K/167Y/258T/266V/447G/466K/536N, 90I/266V/331E/574D, 49G/266V/321A, 94L/266V/509E, 90I/173A/266V/321A/536E, 167Y/266V/298R/447G/466K, 173A/216R/266V/307K/309P/536E, 216R/266V/321A, 49G/90I/173A/209A/266V/309P/331E, 261N/266V/298R/303Q/447R/574Q, 171P/266V/298E/444L/519P, 90I/266V/536E/574D/598S/650G, 49G/63L/90I/210L/266V/307K/321A/598S/650G, 90I/216R/266V/307K/536E/574D, 18E/94L/102C/260G/266V/370G/464L/554T, 18E/266V/423R/465S/474A, 167Y/261N/266V/447G/536G, 114K/173A/209A/210L/266V, 266V/307K/309P/536E/574D/598S, 102C/260G/266V/370G/576I, 266V/574D, 173A/209A/210L/266V/307K/536E, 216R/266V/309P/536E, 266V/349G, 266 V/447L/536A/606Q, 266V/310R/454A/479D/519P/662R, 49G/90I/209A/266V/598S, 266V/314K/536N, 171P/266V/300I/454A/479D/508L/662R, 171P/242A/266V/300I/508L/662R, 49G/266V/331E/536E, 173A/216R/266V/309P/536E/574D/598S, 266V/536E/598S, 167Y/261N/266V/298R/303Q/447R/466K/574Q, 173A/266V/536E/598S, 49G/114K/266V/309P/536E/574D/598S, 49G/114K/266V/309P/349G/536E, 63P/68S/81K/266V/303Q/466K, 63L/90I/209A/216R/266V/307K/309P/321A/349G/536E/574D/598S/650G, 216R/266V, 173A/210L/266V/307K/598S/650G, 25E/102C/266V/370G/423R, 68S/261N/266V/298R/303Q, 266V/423R/474A, 94L/266V/423R/474A/554T/576I, 63P/266V/298R/447R/574Q, 49G/63L/90I/173A/266V/307K/321A/331E/574D/595N/650G, 49G/90I/266V/536E/574D, 266V/508L, 63P/81K/167Y/258T/266V/261N/298R/303Q/447G, 114K/266V/331E, 212N/266V/298E/583K/606K, 49G/173A/266V/536E/574Q, 49G/242A/266V/298E/300I/310R/444L/454A/479D, 49G/266V/309P/321A/536E/598S, 63P/68S/261N/266V/536G, 266 V/300I/444L/508L, or 266V/298R, wherein the amino acid positions are relative to the reference sequence of SEQ ID NO: 2.

[0216] In some embodiments, the recombinant polynucleotide encodes the recombinant reverse transcriptase comprising a polypeptide sequence comprising at least a substitution or substitution set 49G/134P/266V/307K/536E, 49G/74P/266V/307K/536E, 49G/83A/266V/307K/536E, 49G/266V/307K/319G/536E, 49G/92T/266V/307K/536E, 49G/266V/307K/329S/536E, 49G/266V/307K/343A/536E, 49G/266V/307K/311P/536E, 49G/266V/307K/338V/536E, 49G/196C/266V/307K/536E, 49G/69R/266V/307K/536E, 49G/72M/266V/307K/536E, 49G/266V/294Q/307K/536E, 49G/83W/266V/294Q/307K/536E, 49G/134F/266V/307K/536E, 49G/130S/266V/307K/536E, 49G/266V/305P/307K/536E, 49G/266V/307K/319S/536E, 49G/113T/266V/307K/536E, 49G/266V/297W/307K/536E, 49G/266V/307K/319C/536E, 49G/114G/266V/307K/536E, 49G/266V/307K/308G/536E, 49G/266V/307K/309E/536E, 49G/266V/307K/342W/536E, 49G/205M/266V/307K/536E, 49G/212K/266V/307K/536E, 49G/199L/266V/307K/536E, 49G/83C/266V/307K/536E, 49G/266V/303G/307K/536E, 49G/266V/307K/309T/536E, 49G/78V/266V/307K/536E, 49G/113G/266V/307K/536E, 49G/132F/266V/307K/536E, 49G/266V/307K/311I/536E, 49G/119Y/266V/307K/536E, 49G/83E/266V/307K/536E, 49G/98S/266V/307K/536E, 49G/266V/307K/314M/536E, 49G/129L/266V/307K/536E, 49G/266V/307K/343V/536E, 49G/196H/266V/307K/536E, 49G/74M/266V/307K/536E, 49G/266V/307K/356P/536E, 49G/89A/266V/307K/536E, 49G/212V/266V/307K/536E, 49G/266V/307K/444L/508L/509E/536E/574D, 49G/63L/260G/266V/298R/300I/307K/331E/444L/509E/536E , 49G/63L/90I/209A/266V/307K/444L/508L/536E/574Q, 49G/266V/298R/307K/444L/509E/536E, 49G/63L/90I/266V/307K/508L/509E/536E/574Q/595N, 49G/83R/266V/307K/536E, 49G/266V/307K/311A/536E, 49G/89M/266V/307K/536E, 49G/130R/266V/307K/536E, 49G/178L/266V/307K/536E, or 49G/118R/266V/307K/536E, wherein the amino acid positions are relative to the reference sequence of SEQ ID NO:2.

[0217] In some embodiments, the recombinant polynucleotide encodes the recombinant reverse transcriptase comprising a polypeptide sequence comprising at least a substitution or substitution set 49G/266V/298R/307K/309E/342W/444L/509E/536E, 49G/266V/298R/307K/309T/444L/509E/536E, 49G/129L/266V/307K/444L/509E/536E, 49G/266V/298R/307K/444L/536E/574Q, 49G/85R/266V/298R/307K/444L/509E/536E, 49G/985/119Y/129L/132F/196H/266V/307K/444L/509E/536E, 49G/985/266V/307K/317C/343V/356P/444L/509E/536E, 49G/205M/212K/266V/307K/309E/319S/342W/444L/536E, 49G/266V/298R/307K/509E/536E, 49G/78V/132F/266V/298R/307K/314M/444L/509E/536E, 49G/78V/83E/98S/266V/298R/307K/444L/509E/536E, 49G/78V/83E/119Y/132F/196H/266V/298R/307K/509E/536E, 49G/78V/83E/266V/307K/444L/509E/536E, 49G/78V/83E/266V/307K/444L/536E, 49G/78V/83E/266V/307K/356P/444L/509E/536E, 49G/78V/266V/307K/509E/536E, 49G/119Y/129L/132F/266V/298R/307K/444L/509E/536E, 49G/178L/266V/303G/307K/331E/338V/444L/508L/509E/536E, 49G/266V/298R/307K/311I/314M/444L/509E/536E, 49G/63L/266V/297W/298R/303G/305P/307K/509E/536E, 49G/63L/178L/209A/260G/266V/298R/307K/444L/509E/536E/574Q, 49G/63L/266V/298R/300I/307K/338V/444L/509E/536E, 49G/83A/266V/294Q/298R/307K/444L/509E/536E, 49G/83A/92T/266V/307K/343A/444L/509E/536E/574Q, 49G/83A/92T/134P/266V/298R/307K/509E/536E/574Q, 49G/83A/196C/266V/298R/307K/329S/343A/444L/509E/536E, 49G/83A/196C/266V/307K/444L/536E, 49G/83A/134F/196C/294Q/266V/305S/307K/311P/319G/329S/343A/509E/536E/574Q, 49G/83C/266V/298R/307K/444L/509E/536E, 49G/83C/266V/298R/307K/309T/444L/509E/536E, 49G/83C/266V/298R/307K/319S/342W/444L/536E, 49G/83C/205M/266V/298R/307K/509E/536E, 49G/83C/266V/298R/307K/509E/536E, 49G/83C/114G/266V/298R/307K/444L/509E/536E, 49G/83C/114G/266V/298R/307K/309T/444L/536E, 49G/83C/114G/266V/307K/319C/444L/509E/536E, 49G/83C/199L/212K/266V/307K/309E/319C/509E/536E/639H, 49G/83C/199L/266V/298R/307K/444L/536E, 49G/83C/266V/307K/444L/509E/536E, 49G/83C/266V/307K/342W/444L/509E/536E, 49G/83C/266V/298R/307K/308G/309E/444L/509E/536E/595N/638H, 49G/83C/113T/114G/205M/212K/266V/298R/307K/444L/509E/536E, 49G/83C/130S/266V/307K/509E/536E, 49G/114G/266V/298R/307K/309E/444L/509E/536E, 49G/114G/266V/298R/307K/309E/444L/536E, 49G/114G/212K/266V/298R/307K/309E/342W/444L/509E/536E/639H, 49G/114G/205M/266V/298R/307K/509E/536E, 49G/114G/266V/307K/444L/509E/536E, 49G/114G/1305S/266V/298R/307K/319S/509E/536E, 49G/114G/130S/212K/266V/307K/342W/444L/509E/536E, 49G/114G/130S/266V/307 K/309E/444L/509E/536E, 49G/199L/266V/298R/307K/309T/444L/509E/536E, 49G/199L/205M/266V/298R/307K/509E/536E, 49G/266V/307K/444L/509E/536E, 49G/266V/307K/342W/444L/509E/536E, 49G/266V/307K/444L/536E, 49G/266V/307K/343A/509E/536E/595N, 49G/74M/266V/298R/307K/444L/509E/536E, 49G/74M/129L/266V/307K/509E/536E, 49G/74M/83E/129L/132F/212V/266V/298R/307K/444L/536E, 49G/74P/83A/92T/266V/307K/343A/444L/536E, 49G/74P/83A/134P/266V/294Q/307 K/444L/509E/536E/574Q, 49G/74P/83W/266V/298R/307K/536E, 49G/74P/266V/307K/329S/509E/536E/574Q, 49G/74P/92T/196C/266V/294Q/298R/307K//329S/444L/509E/536E, 49G/92T/266V/307K/444L/536E, 49G/72M/266V/298R/307K/444L/509E/536E, 49G/72M/266V/294Q/298R/307K/311A/329S/343A/509E/536E, 49G/72M/266V/294Q/307K/509E/536E, 49G/72M/266V/294Q/307K/311A/329S/509E/536E, 49G/72M/266V/298R/307K/444L/536E, 49G/72M/83A/266V/307K/343A/509E/536E, 49G/266V/72M/74P/294Q/307K/509E/536E, 49G/72M/74P/83A/266V/298R/307K/319G/329S/444L/536E, 49G/72M/74P/83A/84N/266V/298R/307K/509E/536E, 49G/72M/74P/83A/134F/196C/266V/294Q/307K/444L/509E/536E, 49G/72M/74P/266V/307K/444L/536E, 49G/72M/74P/92T/266V/294Q/307K/329S/444L/509E/536E, 49G/72M/74P/92T/266V/307K/444L/509E/536E, 49G/72M/74P/92T/134P/266V/307K/343A/509E/536E, 49G/72M/74P/134F/196C/266V/307K/319G/329S/444L/536E, 49G/72M/196C/266V/298R/307K/311A/329S/444L/509E/536E/574Q, 49G/72M/134P/196C/266V/307K/444L/509E/536E, 49G/118R/178L/266V/298R/307K/338V/444L/509E/536E, 49G/69R/89A/178L/266V/298R/303G/305P/307K/338V/444L/509E/536E/574Q, 49G/113G/266V/298R/307K/444L/509E/536E, 49G/113G/178L/260G/266V/298R/307K/444L/509E/536E, 49G/113T/266V/298R/307K/309E/444L/509E/536E, 49G/113T/212K/266V/298R/307K/309E/444L/509E/536E, 49G/113T/266V/298R/307K/342W/444L/509E/536E, 49G/113T/114G/266V/298R/307K/444L/509E/536E, 49G/113T/114G/212K/266V/298R/307K/444L/509E/536E, 49G/113T/114G/205M/266V/298R/307K/319C/342W/444L/509E/536E, 49G/113T/114G/266V/307K/342W/444L/509E/536E, 49G/113T/114G/130S/266V/298R/307K/444L/509E/536E, 49G/113T/266V/307K/444L/509E/536E, 49G/113T/266V/298R/307K/309E/509E/536E, 49G/130S/205M/266V/298R/307K/333V/509E/536E, 49G/134P/266V/298R/307K/444L/509E/536E, or 49G/134P/266V/294Q/298R/307K/536E, wherein the amino acid positions are relative to the reference sequence of SEQ ID NO: 2.

[0218] In some embodiments, the recombinant polynucleotide encodes the recombinant reverse transcriptase comprising a polypeptide sequence having at least 75%, 80%, 81%, 82%, 83%, 84%, 85%, 86%, 87%, 88%, 89%, 90%, 91%, 92%, 93%, 94%, 95%, 96%, 97%, 98%, 99%, or more sequence identity to the reference sequence comprising residues 12 to 687 of SEQ ID NO: 24, 94, or 352, or to a reference sequence of SEQ ID NO: 24, 94, or 352. In some embodiments, it includes the proviso that the polypeptide sequence does not include a sequence corresponding to residues 12 to 687 of SEQ ID NO: 2.

[0219] In some embodiments, the recombinant polynucleotide encodes the recombinant reverse transcriptase comprising a polypeptide sequence comprising at least a substitution at amino acid position 18, 25, 49, 63, 68, 69, 72, 74, 78, 81, 83, 89, 90, 92, 94, 98, 102, 113, 114, 118, 119, 129, 130, 132, 134, 163, 167, 171, 173, 178, 196, 199, 205, 209, 210, 212, 216, 242, 258, 260, 261, 266, 294, 297, 298, 300, 303, 305, 307, 308, 309, 310, 311, 314, 319, 321, 329, 331, 338, 342, 343, 349, 356, 370, 403, 423, 444, 447, 454, 464, 465, 466, 474, 479, 508, 509, 519, 536, 537, 554, 574, 576, 583, 595, 598, 606, 650, 662, or 665, or combinations thereof, wherein the amino acid positions are relative to the reference sequence of SEQ ID NO: 24, 94, or 352.

[0220] In some embodiments, the recombinant polynucleotide encodes the recombinant reverse transcriptase comprising a polypeptide sequence comprising at least a substitution at amino acid position 49, 266, 298, 307, 444, 509, or 536, or combinations thereof, wherein the amino acid positions are relative to the reference sequence of SEQ ID NO: 24, 94, or 352.

[0221] In some embodiments, the recombinant polynucleotide encodes the recombinant reverse transcriptase comprising a polypeptide sequence having at least 75%, 80%, 81%, 82%, 83%, 84%, 85%, 86%, 87%, 88%, 89%, 90%, 91%, 92%, 93%, 94%, 95%, 96%, 97%, 98%, 99%, or more sequence identity to a reference sequence corresponding to residues 12 to 687 of SEQ ID NO: 24, or to a reference sequence of SEQ ID NO: 24, wherein the polypeptide sequence comprises one or more substitutions relative to the reference sequence corresponding to residues 12 to 687 of SEQ ID NO: 24, or to a reference sequence of SEQ ID NO: 24.

[0222] In some embodiments, the recombinant polynucleotide encodes the recombinant reverse transcriptase comprising a polypeptide sequence comprising at least a substitution or substitution set at amino acid position 454/508, 536/574, 309, 49/173/309/331, 90/331, 63/90/309/574/650, 90/173/209/210/321/574/598, 508/519, 49/63/90/216/309/321/536/574, 49/114/307/309/536, 307/321/536/574/650, 309/331/536/574/598/650, 173/331/536/574/598, 49/300/403, 74/242, 242/298/508/662, 260/509, 102/370/509, 49/173/216/349/536/598, 49/114/216/307/309/331, 49/90/173/216/307, 63/68/81/167/314/447/574, 49/210/307/309/321/536/574/650, 63/90/307/321/331/537/598, 370/464/465/509/554/576, 49/114/173/216/321/574/598, 90/216/321/650, 574/650, 49/209/210/307/309/536/598, 216/536/574, 49/173/210/309/321/536/598, 331/536/598, 321/574, 173/321/331/349/574, 49/307/536, 216/309/574/650, 94/370/474/576, 90/209/210/309/321/574, 49/63/90/173, 298, 49/300/454/662, 68/81/167/298/536, 49/454, 81, 49/114/173/309/349/536/574/650, 167/261/303/536, 18/102/554, 171/173/307/331/536, 173/216/536, 18/370/464/509, 49/114, 90/216/309/536/574, 444, 90/321/349/536/598/650, 49/163/309/321/536/574/650, 49/63/90/173/307/331/536/598/650, 68/81/167/258/447/466/536, 90/331/574, 49/321, 94/509, 90/173/321/536, 167/298/447/466, 173/216/307/309/536, 216/321, 49/90/173/209/309/331, 261/298/303/447/574, 171/298/444/519, 90/536/574/598/650, 49/63/90/210/307/321/598/650, 90/216/307/536/574, 18/94/102/260/370/464/554, 18/423/465/474, 167/261/447/536, 114/173/209/210, 307/309/536/574/598, 102/260/370/576, 574, 173/209/210/307/536, 216/309/536, 349, 447/536/606, 310/454/479/519/662, 49/90/209/598, 314/536, 171/300/454/479/508/662, 171/242/300/508/662, 49/331/536, 173/216/309/536/574/598, 536/598, 167/261/298/303/447/466/574, 173/536/598, 49/114/309/536/574/598, 49/114/309/349/536, 63/68/81/303/466, 63/90/209/216/307/309/321/349/536/574/598/650, 216, 173/210/307/598/650, 25/102/370/423, 68/261/298/303, 423/474, 94/423/474/554/576, 63/298/447/574, 49/63/90/173/307/321/331/574/595/650, 49/90/536/574, 508, 63/81/167/258/261/298/303/447, 114/331, 212/298/583/606, 49/173/536/574, 49/242/298/300/310/444/454/479, 49/309/321/536/598, 63/68/261/536, 300/444/508, 298, or combinations thereof, wherein the amino acid positions are relative to the reference sequence of SEQ ID NO: 24.

[0223] In some embodiments, the recombinant polynucleotide encodes the recombinant reverse transcriptase comprising a polypeptide sequence having at least 75%, 80%, 81%, 82%, 83%, 84%, 85%, 86%, 87%, 88%, 89%, 90%, 91%, 92%, 93%, 94%, 95%, 96%, 97%, 98%, 99%, or more sequence identity to a reference sequence corresponding to residues 12 to 687 of SEQ ID NO: 94, or to a reference sequence of SEQ ID NO: 94, wherein the polypeptide sequence comprises one or more substitutions relative to the reference sequence corresponding to residues 12 to 687 of SEQ ID NO: 94, or to a reference sequence of SEQ ID NO: 94.

[0224] In some embodiments, the recombinant polynucleotide encodes the the recombinant reverse transcriptase comprising a polypeptide sequence comprising at least a substitution or substitution set at amino acid position 134, 74, 83, 319, 92, 329, 343, 311, 338, 196, 69, 72, 294, 83, 134, 130, 305, 319,113,297,319,114,308,309,342,205,212,199,83,303,309,78,113,132,311,119,83,98, 314, 129, 343, 196, 74, 356, 89, 212, 444/508/509/574, 63/260/298/300/331/444/509, 63/90/209/444/508/574, 298/444/509, 63/90/508/509/574/595, 83, 311, 89, 130, 178, or 118, wherein the amino acid positions are relative to the reference sequence of SEQ ID NO: 94.

[0225] In some embodiments, the recombinant polynucleotide encodes the recombinant reverse transcriptase comprising a polypeptide sequence having at least 75%, 80%, 81%, 82%, 83%, 84%, 85%, 86%, 87%, 88%, 89%, 90%, 91%, 92%, 93%, 94%, 95%, 96%, 97%, 98%, 99%, or more sequence identity to a reference sequence corresponding to residues 12 to 687 of SEQ ID NO: 352, or to a reference sequence of SEQ ID NO: 352, wherein the polypeptide sequence comprises one or more substitutions relative to the reference sequence corresponding to residues 12 to 687 of SEQ ID NO: 352, or to a reference sequence of SEQ ID NO: 352.

[0226] In some embodiments, the recombinant polynucleotide encodes the recombinant reverse transcriptase comprising a polypeptide sequence comprising at least a substitution or substitution set at amino acid position 309/342, 309, 129/298, 509/574, 85, 98/119/129/132/196/298, 98/298/317/343/356, 205/212/298/309/319/342/509, 444, 78/132/314, 78/83/98, 78/83/119/132/196/444, 78/83/298, 78/83/298/509, 78/83/298/356, 78/298/444, 119/129/132, 178/298/303/331/338/508, 311/314, 63/297/303/305/444, 63/178/209/260/574, 63/300/338, 83/294, 83/92/298/343/574, 83/92/134/444/574, 83/196/329/343, 83/196/298/509, 83/134/196/294/298/305/311/319/329/343/444/574, 83, 83/309, 83/319/342/509, 83/205/444, 83/444, 83/114, 83/114/309/509, 83/114/298/319, 83/199/212/298/309/319/444/639, 83/199/509, 83/298, 83/298/342, 83/308/309/595/638, 83/113/114/205/212, 83/130/298/444, 114/309, 114/309/509, 114/212/309/342/639, 114/205/444, 114/298, 114/130/319/444, 114/130/212/298/342, 114/130/298/309, 199/309, 199/205/444, 298, 298/342, 298/509, 298/343/444/595, 74, 74/129/298/444, 74/83/129/132/212/509, 74/83/92/298/343/509, 74/83/134/294/298/574, 74/83/444/509, 74/298/329/444/574, 74/92/196/294/329, 92/298/509, 72, 72/294/311/329/343/444, 72/294/298/444, 72/294/298/311/329/444, 72/509, 72/83/298/343/444, 72/74/294/298/444, 72/74/83/319/329/509, 72/74/83/84/444, 72/74/83/134/196/294/298, 72/74/298/509, 72/74/92/294/298/329, 72/74/92/298, 72/74/92/134/298/343/444, 72/74/134/196/298/319/329/509, 72/196/311/329/574, 72/134/196/298, 118/178/338/444, 69/89/178/303/305/338/444/574, 113, 113/178/260, 113/309, 113/212/309, 113/342, 113/114, 113/114/212, 113/114/205/319/342, 113/114/298/342, 113/114/130, 113/298, 113/298/309/444, 130/205/333/444, 134, or 134/294/444/509, wherein the amino acid positions are relative to the reference sequence of SEQ ID NO: 352.

[0227] In some embodiments, for each of the foregoing embodiments, the specific amino acid substitutions described herein for the substitution or substitution set can be used for the encoded reverse transcriptase polypeptide.

[0228] In some embodiments, the recombinant polynucleotide encodes a recombinant reverse transcriptase comprising a polypeptide sequence comprising at least one substitution provided in Table 4.1, 5.1, 6.1, and 7.1, wherein the substitution is relative to SEQ ID NO: 2, 24, 94 or 352.

[0229] In some embodiments, the recombinant polynucleotide encodes a recombinant reverse transcriptase comprising a polypeptide sequence comprising at least a substitution or substitution set provided in Table 4.1, 5.1, 6.1, and 7.1, wherein the substitution or substitution set is relative to SEQ ID NO: 2, 24, 94 or 352.

[0230] In some embodiments, the recombinant polynucleotide encodes a recombinant reverse transcriptase comprising a polypeptide sequence having at least 75%, 80%, 85%, 86%, 887%, 88%, 89%, 90%, 91%, 92%, 93%, 94%, 95%, 96%, 97%, 98%, 99% or more sequence identity to a sequence corresponding to residues 12 to 687 of an even numbered SEQ ID NO. set forth in Table 4.1, 5.1, 6.1, and 7.1. In some embodiments, the recombinant polynucleotide encodes a recombinant reverse transcriptase comprising a polypeptide sequence having at least 75%, 80%, 85%, 86%, 887%, 88%, 89%, 90%, 91%, 92%, 93%, 94%, 95%, 96%, 97%, 98%, 99% or more sequence identity to a sequence of an even numbered SEQ ID NO. set forth in Table 4.1, 5.1, 6.1, and 7.1. In some embodiments, the recombinant polynucleotide encodes a recombinant reverse transcriptase comprising a polypeptide sequence comprising residues 12 to 687 of an even numbered SEQ ID NO. set forth in Table 4.1, 5.1, 6.1, and 7.1. In some embodiments, the recombinant polynucleotide encodes a recombinant reverse transcriptase comprising a polypeptide sequence comprising an even numbered SEQ ID NO. set forth in Table 4.1, 5.1, 6.1, and 7.1.

[0231] In some embodiments, the recombinant polynucleotide encodes a recombinant reverse transcriptase comprising a polypeptide sequence comprising residues 12 to 687 of SEQ ID NO: 4, 6, 8, 10, 12, 14, 16, 18, 20, 22, 24, 26, 28, 30, 32, 34, 36, 38, 40, 42, 44, 46, 48, 50, 52, 54, 56, 58, 60, 62, 64, 66, 68, 70, 72, 74, 76, 78, 80, 82, 84, 86, 88, 90, 92, 94, 96, 98, 100, 102, 104, 106, 108, 110, 112, 114, 116, 118, 120, 122, 124, 126, 128, 130, 132, 134, 136, 138, 140, 142, 144, 146, 148, 150, 152, 154, 156, 158, 160, 162, 164, 166, 168, 170, 172, 174, 176, 178, 180, 182, 184, 186, 188, 190, 192, 194, 196, 198, 200, 202, 204, 206, 208, 210, 212, 214, 216, 218, 220, 222, 224, 226, 228, 230, 232, 234, 236, 238, 240, 242, 244, 246, 248, 250, 252, 254, 256, 258, 260, 262, 264, 266, 268, 270, 272, 274, 276, 278, 280, 282, 284, 286, 288, 290, 292, 294, 296, 298, 300, 302, 304, 306, 308, 310, 312, 314, 316, 318, 320, 322, 324, 326, 328, 330, 332, 334, 336, 338, 340, 342, 344, 346, 348, 350, 352, 354, 356, 358, 360, 362, 364, 366, 368, 370, 372, 374, 376, 378, 380, 382, 384, 386, 388, 390, 392, 394, 396, 398, 400, 402, 404, 406, 408, 410, 412, 414, 416, 418, 420, 422, 424, 426, 428, 430, 432, 434, 436, 438, 440, 442, 444, 446, 448, 450, 452, 454, 456. 458, 460. 462, 464, 466, 468, 470, 472, 474, 476, 478, 480, 482, 484, 486, 488, 490, 492, 494, 496, 498, 500, 502, 504, 506, 508, 510, 512, 514, 516, 518, 520, 522, 524, 526, 528, 530, 532, 534, 536, 538, 540, 542, 544, 546, 548, 550, 552, 554, 556, 558, 560, 562, 564, or 566, wherein the polypeptide sequence has optionally 1, 2, 3, 4, 5, 6, 7, 8, 9, or up to 10 substitutions in the polypeptide sequence.

[0232] In some embodiments, the recombinant polynucleotide encodes a recombinant reverse transcriptase comprising a polypeptide sequence comprising SEQ ID NO: 4, 6, 8, 10, 12, 14, 16, 18, 20, 22, 24, 26, 28, 30, 32, 34, 36, 38, 40, 42, 44, 46, 48, 50, 52, 54, 56, 58, 60, 62, 64, 66, 68, 70, 72, 74, 76, 78, 80, 82, 84, 86, 88, 90, 92, 94, 96, 98, 100, 102, 104, 106, 108, 110, 112, 114, 116, 118, 120, 122, 124, 126, 128, 130, 132, 134, 136, 138, 140, 142, 144, 146, 148, 150, 152, 154, 156, 158, 160, 162, 164, 166, 168, 170, 172, 174, 176, 178, 180, 182, 184, 186, 188, 190, 192, 194, 196, 198, 200, 202, 204, 206, 208, 210, 212, 214, 216, 218, 220, 222, 224, 226, 228, 230, 232, 234, 236, 238, 240, 242, 244, 246, 248, 250, 252, 254, 256, 258, 260, 262, 264, 266, 268, 270, 272, 274, 276, 278, 280, 282, 284, 286, 288, 290, 292, 294, 296, 298, 300, 302, 304, 306, 308, 310, 312, 314, 316, 318, 320, 322, 324, 326, 328, 330, 332, 334, 336, 338, 340, 342, 344, 346, 348, 350, 352, 354, 356, 358, 360, 362, 364, 366, 368, 370, 372, 374, 376, 378, 380, 382, 384, 386, 388, 390, 392, 394, 396, 398, 400, 402, 404, 406, 408, 410, 412, 414, 416, 418, 420, 422, 424, 426, 428, 430, 432, 434, 436, 438, 440, 442, 444, 446, 448, 450, 452, 454, 456. 458, 460. 462, 464, 466, 468, 470, 472, 474, 476, 478, 480, 482, 484, 486, 488, 490, 492, 494, 496, 498, 500, 502, 504, 506, 508, 510, 512, 514, 516, 518, 520, 522, 524, 526, 528, 530, 532, 534, 536, 538, 540, 542, 544, 546, 548, 550, 552, 554, 556, 558, 560, 562, 564, or 566, wherein the polypeptide sequence has optionally 1, 2, 3, 4, 5, 6, 7, 8, 9, or up to 10 substitutions in the polypeptide sequence.

[0233] In some embodiments, the encoded recombinant reverse transcriptase polypeptide includes 1, 2, 3, 4, up to 5 substitutions in the polypeptide sequence. In some embodiments, the recombinant reverse transcriptase includes 1, 2, 3, or 4 substitutions in the polypeptide sequence. In some embodiments, the substitutions comprises non-conservative or conservative substitutions. In some embodiments, the substitutions comprises conservative substitutions. In some embodiments, the substitutions comprises non-conservative substitutions. In some embodiments, guidance on non-conservative and conservative substitutions are provided by the variants disclosed herein.

[0234] In some embodiments, the recombinant polynucleotide encodes a recombinant reverse transcriptase polypeptide comprising a polypeptide sequence comprising residues 12 to 687 of SEQ ID NO: 4, 24, 94, or 352, wherein the polypeptide sequence has optionally 1, 2, 3, 4, 5, 6, 7, 8, 9, or up to 10 substitutions in the polypeptide sequence. In some embodiments, the recombinant reverse transcriptase includes 1, 2, 3, 4, up to 5 substitutions in the polypeptide sequence. In some embodiments, the recombinant reverse transcriptase includes 1, 2, 3, or 4 substitutions in the polypeptide sequence.

[0235] In some embodiments, the recombinant polynucleotide encodes the recombinant reverse transcriptase polypeptide comprising a polypeptide sequence comprising SEQ ID NO: 4, 24, 94, or 352, wherein the polypeptide sequence has optionally 1, 2, 3, 4, 5, 6, 7, 8, 9, or up to 10 substitutions in the polypeptide sequence. In some embodiments, the recombinant reverse transcriptase includes 1, 2, 3, 4, up to 5 substitutions in the polypeptide sequence. In some embodiments, the recombinant reverse transcriptase includes 1, 2, 3, or 4 substitutions in the polypeptide sequence.

[0236] In some embodiments, the recombinant polynucleotide comprises a polynucleotide sequence having at least 75%, 80%, 81%, 82%, 83%, 84%, 85%, 90%, 91%, 92%, 93%, 94%, 95%, 96%, 97%, 98%, 99%, or more sequence identity to the reference polynucleotide sequence comprising nucleotide residues 34 to 2061 of SEQ ID NO: 1, or to a reference polynucleotide sequence of SEQ ID NO: 1, wherein the recombinant polynucleotide encodes a recombinant reverse transcriptase or a functional fragment thereof, wherein the polypeptide sequence of the recombinant reverse transcriptase comprises one or more substitutions at one or more amino acid positions relative to the reference sequence corresponding to residues 12 to 687 of SEQ ID NO: 2, or to the reference sequence of SEQ ID NO: 2.

[0237] In some embodiments, a reverse transcriptase polynucleotide comprises at least 75%, 80%, 85%, 90%, 91%, 92%, 93%, 94%, 95%, 96%, 97%, 98%, 99%, or more sequence identity to the reference polynucleotide sequence of SEQ ID NO: 1 encoding a recombinant reverse transcriptase or a functional fragment thereof, wherein the recombinant reverse transcriptase comprises at least one substitution at one or more amino acid positions relative to the reference polypeptide sequence of SEQ ID NO: 2.

[0238] In some embodiments, the recombinant polynucleotide comprises a polynucleotide sequence having at least 75%, 80%, 81%, 82%, 83%, 84%, 85%, 90%, 91%, 92%, 93%, 94%, 95%, 96%, 97%, 98%, 99%, or more sequence identity to a reference polynucleotide sequence comprising nucleotide residues 34 to 2061 of SEQ ID NO: 3, 23, 93, or 351, or to a reference polynucleotide sequence of SEQ ID NO: 3, 23, 93, or 351, wherein the recombinant polynucleotide encodes a recombinant reverse transcriptase or a functional fragment thereof.

[0239] In some embodiments, the recombinant polynucleotide comprises a polynucleotide sequence having at least 75%, 80%, 85%, 86%, 87%, 88%, 89%, 90%, 91%, 92%, 93%, 94%, 95%, 96%, 97%, 98%, 99% or more sequence identity to a polynucleotide sequence corresponding to nucleotide residues 34 to 2061 of SEQ ID NO: 3, 5, 7, 9, 11, 13, 15, 17, 19, 21, 23, 25, 27, 29, 31, 33, 35, 37. 39, 41, 43, 45, 47, 49, 51, 53, 55, 57, 59, 61, 63, 65, 67, 69, 71, 73, 75, 77, 79, 81, 83, 85, 87, 89, 91, 93, 95, 97, 99, 101, 103, 105, 107, 109, 111, 113, 115, 117, 119, 121, 123, 125, 127, 129, 131, 133, 135, 137, 139, 141, 143, 145, 147, 149, 151, 153, 155, 157, 159, 161, 163, 165, 167, 169, 171, 173, 175, 177, 179, 181, 183, 185, 187, 189, 191, 193, 195, 197, 199, 201, 203, 205, 207, 209, 211, 213, 215, 217, 219, 221, 223, 225, 227, 229, 231, 233, 235, 237, 239, 241, 243, 245, 247, 249, 251, 253, 255, 257, 259, 261, 263, 265, 267, 269, 271, 273, 275, 277, 279, 281, 283, 285, 287, 289, 291, 293, 295, 297, 299, 301, 303, 305, 307, 309, 311, 313, 315, 317, 319, 321, 323, 325, 327, 329, 331, 333, 335, 337, 339, 341, 343, 345, 347, 349, 351, 353, 355, 357, 359, 361, 363, 365, 367, 369, 371, 373, 375, 377, 379, 381, 383, 385, 387, 389, 391, 393, 395, 397, 399, 401, 403, 405, 407, 409, 411, 413, 415, 417, 419, 421, 423, 425, 427, 429, 431, 433, 435, 437, 439, 441, 443, 445, 447, 449, 451, 453, 455, 457. 459, 461. 463, 465, 467, 469, 471, 473, 475, 477, 479, 481, 483, 485, 487, 489, 491, 493, 495, 497, 499, 501, 503, 505, 507, 509, 511, 513, 515, 517, 519, 521, 523, 525, 527, 529, 531, 533, 535, 537, 539, 541, 543, 545, 547, 549, 551, 553, 555, 557, 559, 561, 563, or 565, wherein the polynucleotide encodes a reverse transcriptase, as described herein.

[0240] In some embodiments, the recombinant polynucleotide comprises a polynucleotide sequence comprising nucleotide residues 34 to 2061 of SEQ ID NO: 3, 5, 7, 9, 11, 13, 15, 17, 19, 21, 23, 25, 27, 29, 31, 33, 35, 37.39, 41, 43, 45, 47, 49, 51, 53, 55, 57, 59, 61, 63, 65, 67, 69, 71, 73, 75, 77, 79, 81, 83, 85, 87, 89, 91, 93, 95, 97, 99, 101, 103, 105, 107, 109, 111, 113, 115, 117, 119, 121, 123, 125, 127, 129, 131, 133, 135, 137, 139, 141, 143, 145, 147, 149, 151, 153, 155, 157, 159, 161, 163, 165, 167, 169, 171, 173, 175, 177, 179, 181, 183, 185, 187, 189, 191, 193, 195, 197, 199, 201, 203, 205, 207, 209, 211, 213, 215, 217, 219, 221, 223, 225, 227, 229, 231, 233, 235, 237, 239, 241, 243, 245, 247, 249, 251, 253, 255, 257, 259, 261, 263, 265, 267, 269, 271, 273, 275, 277, 279, 281, 283, 285, 287, 289, 291, 293, 295, 297, 299, 301, 303, 305, 307, 309, 311, 313, 315, 317, 319, 321, 323, 325, 327, 329, 331, 333, 335, 337, 339, 341, 343, 345, 347, 349, 351, 353, 355, 357, 359, 361, 363, 365, 367, 369, 371, 373, 375, 377, 379, 381, 383, 385, 387, 389, 391, 393, 395, 397, 399, 401, 403, 405, 407, 409, 411, 413, 415, 417, 419, 421, 423, 425, 427, 429, 431, 433, 435, 437, 439, 441, 443, 445, 447, 449, 451, 453, 455, 457. 459, 461. 463, 465, 467, 469, 471, 473, 475, 477, 479, 481, 483, 485, 487, 489, 491, 493, 495, 497, 499, 501, 503, 505, 507, 509, 511, 513, 515, 517, 519, 521, 523, 525, 527, 529, 531, 533, 535, 537, 539, 541, 543, 545, 547, 549, 551, 553, 555, 557, 559, 561, 563, or 565.

[0241] In some embodiments, the recombinant polynucleotide comprises a polynucleotide sequence having at least 75%, 80%, 85%, 86%, 87%, 88%, 89%, 90%, 91%, 92%, 93%, 94%, 95%, 96%, 97%, 98%, 99% or more sequence identity to a polynucleotide sequence corresponding to SEQ ID NO: 3, 5, 7, 9, 11, 13, 15, 17, 19, 21, 23, 25, 27, 29, 31, 33, 35, 37. 39, 41, 43, 45, 47, 49, 51, 53, 55, 57, 59, 61, 63, 65, 67, 69, 71, 73, 75, 77, 79, 81, 83, 85, 87, 89, 91, 93, 95, 97, 99, 101, 103, 105, 107, 109, 111, 113, 115, 117, 119, 121, 123, 125, 127, 129, 131, 133, 135, 137, 139, 141, 143, 145, 147, 149, 151, 153, 155, 157, 159, 161, 163, 165, 167, 169, 171, 173, 175, 177, 179, 181, 183, 185, 187, 189, 191, 193, 195, 197, 199, 201, 203, 205, 207, 209, 211, 213, 215, 217, 219, 221, 223, 225, 227, 229, 231, 233, 235, 237, 239, 241, 243, 245, 247, 249, 251, 253, 255, 257, 259, 261, 263, 265, 267, 269, 271, 273, 275, 277, 279, 281, 283, 285, 287, 289, 291, 293, 295, 297, 299, 301, 303, 305, 307, 309, 311, 313, 315, 317, 319, 321, 323, 325, 327, 329, 331, 333, 335, 337, 339, 341, 343, 345, 347, 349, 351, 353, 355, 357, 359, 361, 363, 365, 367, 369, 371, 373, 375, 377, 379, 381, 383, 385, 387, 389, 391, 393, 395, 397, 399, 401, 403, 405, 407, 409, 411, 413, 415, 417, 419, 421, 423, 425, 427, 429, 431, 433, 435, 437, 439, 441, 443, 445, 447, 449, 451, 453, 455, 457. 459, 461. 463, 465, 467, 469, 471, 473, 475, 477, 479, 481, 483, 485, 487, 489, 491, 493, 495, 497, 499, 501, 503, 505, 507, 509, 511, 513, 515, 517, 519, 521, 523, 525, 527, 529, 531, 533, 535, 537, 539, 541, 543, 545, 547, 549, 551, 553, 555, 557, 559, 561, 563, or 565, wherein the polynucleotide encodes a reverse transcriptase, as described herein.

[0242] In some embodiments, the recombinant polynucleotide comprises the sequence comprising SEQ ID NO: 3, 5, 7, 9, 11, 13, 15, 17, 19, 21, 23, 25, 27, 29, 31, 33, 35, 37. 39, 41, 43, 45, 47, 49, 51, 53, 55, 57, 59, 61, 63, 65, 67, 69, 71, 73, 75, 77, 79, 81, 83, 85, 87, 89, 91, 93, 95, 97, 99, 101, 103, 105, 107, 109, 111, 113, 115, 117, 119, 121, 123, 125, 127, 129, 131, 133, 135, 137, 139, 141, 143, 145, 147, 149, 151, 153, 155, 157, 159, 161, 163, 165, 167, 169, 171, 173, 175, 177, 179, 181, 183, 185, 187, 189, 191, 193, 195, 197, 199, 201, 203, 205, 207, 209, 211, 213, 215, 217, 219, 221, 223, 225, 227, 229, 231, 233, 235, 237, 239, 241, 243, 245, 247, 249, 251, 253, 255, 257, 259, 261, 263, 265, 267, 269, 271, 273, 275, 277, 279, 281, 283, 285, 287, 289, 291, 293, 295, 297, 299, 301, 303, 305, 307, 309, 311, 313, 315, 317, 319, 321, 323, 325, 327, 329, 331, 333, 335, 337, 339, 341, 343, 345, 347, 349, 351, 353, 355, 357, 359, 361, 363, 365, 367, 369, 371, 373, 375, 377, 379, 381, 383, 385, 387, 389, 391, 393, 395, 397, 399, 401, 403, 405, 407, 409, 411, 413, 415, 417, 419, 421, 423, 425, 427, 429, 431, 433, 435, 437, 439, 441, 443, 445, 447, 449, 451, 453, 455, 457. 459, 461. 463, 465, 467, 469, 471, 473, 475, 477, 479, 481, 483, 485, 487, 489, 491, 493, 495, 497, 499, 501, 503, 505, 507, 509, 511, 513, 515, 517, 519, 521, 523, 525, 527, 529, 531, 533, 535, 537, 539, 541, 543, 545, 547, 549, 551, 553, 555, 557, 559, 561, 563, or 565.

[0243] In some embodiments, the recombinant polynucleotide encodes a reverse transcriptase and hybridizes under highly stringent conditions to a reference polynucleotide sequence described herein encoding a recombinant reverse transcriptase. In some embodiments, the reference sequence corresponds to residues residues 34 to 2061 of SEQ ID NO: 1, 3, 23, 93, or 351, or to the sequence corresponding to SEQ ID NO: 1, 3, 23, 93, or 351, or a complement thereof, or a polynucleotide sequence encoding any of the other recombinant reverse transcriptases provided herein. In some embodiments, the polynucleotide encodes a reverse transcriptase and hybridizes under highly stringent conditions to a reference polynucleotide comprising a sequence corresponding to residues 34 to 2061 of an odd numbered sequence of SEQ ID NOS: 1-565, or to a reference polynucleotide comprising a sequence corresponding to an odd numbered sequence of SEQ ID NOS: 1-565.

[0244] In some embodiments, the polynucleotide capable of hybridizing under highly stringent conditions encodes a reverse transcriptase comprising an amino acid sequence that has one or more residue differences as compared to SEQ ID NO: 2, 4, 24, 94, or 352, at residue positions selected from any positions as set forth in Tables 4.1, 5.1, 6.1, and 7.1. In some embodiments, the polynucleotide that hybridizes under highly stringent conditions comprises a polynucleotide having at least 70%, 75%, 80%, 81%, 82%, 83%, 84%, 85%, 86%, 87%, 88%, 89%, 90%, 91%, 92%, 93%, 94%, 95%, 96%, 97%, 98%, 99% or more sequence identity to a reference sequence corresponding to residues 34 to 2061 of SEQ ID NO: 1, 3, 23, 93, or 351, or to a reference sequence corresponding to SEQ ID NO: 1, 3, 23, 93, or 351. In some additional embodiments, the polynucleotide hybridizing under highly stringent conditions comprises a sequence having at least 75%, 80%, 81%, 82%, 83%, 84%, 85%, 86%, 87%, 88%, 89%, 90%, 91%, 92%, 93%, 94%, 95%, 96%, 97%, 98%, 99% or more sequence identity to at least one polynucleotide reference sequence corresponding to residues 34 to 2061 of a polynucleotide sequence provided in Tables 4.1, 5.1, 6.1, and 7.1, or corresponding to a polynucleotide sequence provided in Tables 4.1, 5.1, 6.1, and 7.1.

[0245] In some embodiments, an isolated polynucleotide encoding any of the recombinant reverse transcriptase polypeptides herein is manipulated in a variety of ways to facilitate expression of the reverse transcriptase polypeptide. In some embodiments, the polynucleotide encoding a recombinant reverse transcriptase is in an expression vector to express the polynucleotide and/or encoded polypeptide. In some embodiments, the polynucleotide can be operably linked to one or more control sequences to regulate expression of the reverse transcriptase polynucleotides and/or polypeptides. Manipulation of the isolated polynucleotide prior to its insertion into a vector may be desirable or necessary depending on the expression vector utilized. Techniques for modifying polynucleotides and nucleic acid sequences utilizing recombinant DNA methods are well known in the art.

[0246] In some embodiments, the control sequences include among others, promoters, leader sequences, polyadenylation sequences, propeptide sequences, signal peptide sequences, and transcription terminators. In some embodiments, suitable promoters are selected based on the host cells selection. For bacterial host cells, suitable promoters for directing transcription of the nucleic acid constructs of the present disclosure, include, but are not limited to promoters obtained from the E. coli lac operon, Streptomyces coelicolor agarase gene (dagA), Bacillus subtilis levansucrase gene (sacB), Bacillus licheniformis alpha-amylase gene (amyL), Bacillus stearothermophilus maltogenic amylase gene (amyM), Bacillus amyloliquefaciens alpha-amylase gene (amyQ), Bacillus licheniformis penicillinase gene (penP), Bacillus subtilis xylA and xylB genes, and prokaryotic beta-lactamase gene (See e.g., Villa-Kamaroff et al., Proc. Natl Acad. Sci. USA, 1978, 75:3727-3731), as well as the tac promoter (See e.g., DeBoer et al., Proc. Natl Acad. Sci. USA, 1983, 80: 21-25). Exemplary promoters for filamentous fungal host cells, include, but are not limited to promoters obtained from the genes for Aspergillus oryzae TAKA amylase, Rhizomucor miehei aspartic proteinase, Aspergillus niger neutral alpha-amylase, Aspergillus niger acid stable alpha-amylase, Aspergillus niger or Aspergillus awamori glucoamylase (glaA), Rhizomucor miehei lipase, Aspergillus oryzae alkaline protease, Aspergillus oryzae triose phosphate isomerase, Aspergillus nidulans acetamidase, and Fusarium oxysporum trypsin-like protease (See e.g., WO 96/00787), as well as the NA2-tpi promoter (a hybrid of the promoters from the genes for Aspergillus niger neutral alpha-amylase and Aspergillus oryzae triose phosphate isomerase), and mutant, truncated, and hybrid promoters thereof. Exemplary yeast cell promoters can be from the genes can be from the genes for Saccharomyces cerevisiae enolase (ENO-1), Saccharomyces cerevisiae galactokinase (GAL1), Saccharomyces cerevisiae alcohol dehydrogenase/glyceraldehyde-3-phosphate dehydrogenase (ADH2/GAP), and Saccharomyces cerevisiae 3-phosphoglycerate kinase. Other useful promoters for yeast host cells are known in the art (See e.g., Romanos et al., Yeast, 1992, 8:423-488).

[0247] In some embodiments, the control sequence is also a suitable transcription terminator sequence (i.e., a sequence recognized by a host cell to terminate transcription). In some embodiments, the terminator sequence is operably linked to the 3′ terminus of the nucleic acid sequence encoding the DNA polymerase polypeptide. Any suitable terminator which is functional in the host cell of choice finds use in the present invention. Exemplary transcription terminators for filamentous fungal host cells can be obtained from the genes for Aspergillus oryzae TAKA amylase, Aspergillus niger glucoamylase, Aspergillus nidulans anthranilate synthase, Aspergillus niger alpha-glucosidase, and Fusarium oxysporum trypsin-like protease. Exemplary terminators for yeast host cells can be obtained from the genes for Saccharomyces cerevisiae enolase, Saccharomyces cerevisiae cytochrome C (CYC1), and Saccharomyces cerevisiae glyceraldehyde-3-phosphate dehydrogenase. Other useful terminators for yeast host cells are known in the art (see e.g., Romanos et al., supra).

[0248] In some embodiments, the control sequence is also a suitable leader sequence (i.e., a non-translated region of an mRNA that is important for translation by the host cell). In some embodiments, the leader sequence is operably linked to the 5′ terminus of the nucleic acid sequence encoding the DNA polymerase polypeptide. Any suitable leader sequence that is functional in the host cell of choice find use in the present invention. Exemplary leaders for filamentous fungal host cells are obtained from the genes for Aspergillus oryzae TAKA amylase, and Aspergillus nidulans triose phosphate isomerase. Suitable leaders for yeast host cells are obtained from the genes for Saccharomyces cerevisiae enolase (ENO-1), Saccharomyces cerevisiae 3-phosphoglycerate kinase, Saccharomyces cerevisiae alpha-factor, and Saccharomyces cerevisiae alcohol dehydrogenase/glyceraldehyde-3-phosphate dehydrogenase (ADH2/GAP).

[0249] In some embodiments, the control sequence is also a polyadenylation sequence (i.e., a sequence operably linked to the 3′ terminus of the nucleic acid sequence and which, when transcribed, is recognized by the host cell as a signal to add polyadenosine residues to transcribed mRNA). Any suitable polyadenylation sequence which is functional in the host cell of choice finds use in the present invention. Exemplary polyadenylation sequences for filamentous fungal host cells include, but are not limited to the genes for Aspergillus oryzae TAKA amylase, Aspergillus niger glucoamylase, Aspergillus nidulans anthranilate synthase, Fusarium oxysporum trypsin-like protease, and Aspergillus niger alpha-glucosidase. Useful polyadenylation sequences for yeast host cells are known (See e.g., Guo and Sherman, Mol. Cell. Biol., 1995, 15:5983-5990).

[0250] In some embodiments, the control sequence comprises a 3′ untranslated nucleic acid region and polyadenylation tail nucleic acid sequence, sequences operably linked to the 3′ terminus of the protein coding nucleic acid sequence which mediate binding to proteins involved in mRNA trafficking and translation and mRNA half-life. Any polyadenylation sequence and 3′ UTR which is functional in the host cell of choice may be used in the present invention. Exemplary polyadenylation sequences for filamentous fungal host cells include, but are not limited to those from the genes for Aspergillus oryzae TAKA amylase, Aspergillus niger glucoamylase, Aspergillus nidulans anthranilate synthase, Fusarium oxysporum trypsin-like protease, and Aspergillus niger alpha-glucosidase.

[0251] In some embodiments, the control sequence is also a signal peptide (i.e., a coding region that codes for an amino acid sequence linked to the amino terminus of a polypeptide and directs the encoded polypeptide into the cell's secretory pathway). In some embodiments, the 5′ end of the coding sequence of the nucleic acid sequence inherently contains a signal peptide coding region naturally linked in translation reading frame with the segment of the coding region that encodes the secreted polypeptide. Alternatively, in some embodiments, the 5′ end of the coding sequence contains a signal peptide coding region that is foreign to the coding sequence. Any suitable signal peptide coding region which directs the expressed polypeptide into the secretory pathway of a host cell of choice finds use for expression of the engineered polypeptide(s). Effective signal peptide coding regions for bacterial host cells are the signal peptide coding regions include, but are not limited to those obtained from the genes for Bacillus NCIB 11837 maltogenic amylase, Bacillus stearothermophilus alpha-amylase, Bacillus licheniformis subtilisin, Bacillus licheniformis beta-lactamase, Bacillus stearothermophilus neutral proteases (nprT, nprS, nprM), and Bacillus subtilis prsA. Further signal peptides are known in the art (See e.g., Simonen and Palva, Microbiol. Rev., 1993, 57:109-137). In some embodiments, effective signal peptide coding regions for filamentous fungal host cells include, but are not limited to the signal peptide coding regions obtained from the genes for Aspergillus oryzae TAKA amylase, Aspergillus niger neutral amylase, Aspergillus niger glucoamylase, Rhizomucor miehei aspartic proteinase, Humicola insolens cellulase, and Humicola lanuginosa lipase. Useful signal peptides for yeast host cells include, but are not limited to those from the genes for Saccharomyces cerevisiae alpha-factor and Saccharomyces cerevisiae invertase.

[0252] In some embodiments, the control sequence is also a propeptide coding region that codes for an amino acid sequence positioned at the amino terminus of a polypeptide. The resultant polypeptide is referred to as a “proenzyme,” “propolypeptide,” or “zymogen.” A propolypeptide can be converted to a mature active polypeptide by catalytic or autocatalytic cleavage of the propeptide from the propolypeptide. The propeptide coding region may be obtained from any suitable source, including, but not limited to the genes for Bacillus subtilis alkaline protease (aprE), Bacillus subtilis neutral protease (nprT), Saccharomyces cerevisiae alpha-factor, Rhizomucor miehei aspartic proteinase, and Myceliophthora thermophila lactase (See e.g., WO 95/33836). Where both signal peptide and propeptide regions are present at the amino terminus of a polypeptide, the propeptide region is positioned next to the amino terminus of a polypeptide and the signal peptide region is positioned next to the amino terminus of the propeptide region.

[0253] In some embodiments, regulatory sequences are also utilized. These sequences facilitate the regulation of the expression of the polypeptide relative to the growth of the host cell. Examples of regulatory systems are those that cause the expression of the gene to be turned on or off in response to a chemical or physical stimulus, including the presence of a regulatory compound. In prokaryotic host cells, suitable regulatory sequences include, but are not limited to the lac, tac, and trp operator systems. In yeast host cells, suitable regulatory systems include, but are not limited to the ADH2 system or GAL1 system. In filamentous fungi, suitable regulatory sequences include, but are not limited to the TAKA alpha-amylase promoter, Aspergillus niger glucoamylase promoter, and Aspergillus oryzae glucoamylase promoter.

[0254] In view of the foregoing, in another aspect, the present disclosure provides a recombinant expression vector comprising a recombinant polynucleotide encoding a recombinant reverse transcriptase polypeptide described herein, and one or more expression regulating regions such as a promoter and a terminator, a replication origin, etc., depending on the type of hosts into which they are to be introduced. In some embodiments, the various nucleic acid and control sequences described herein are joined together to produce recombinant expression vectors which include one or more convenient restriction sites to allow for insertion or substitution of the nucleic acid sequence encoding the DNA polymerase polypeptide at such sites. Alternatively, in some embodiments, the nucleic acid sequence of the present invention is expressed by inserting the nucleic acid sequence or a nucleic acid construct comprising the sequence into an appropriate vector for expression. In some embodiments involving the creation of the expression vector, the coding sequence is located in the vector so that the coding sequence is operably linked with the appropriate control sequences for expression.

[0255] The recombinant expression vector may be any suitable vector (e.g., a plasmid or virus), that can be conveniently subjected to recombinant DNA procedures and bring about the expression of the DNA polymerase polynucleotide sequence. The choice of the vector typically depends on the compatibility of the vector with the host cell into which the vector is to be introduced. The vectors may be linear or closed circular plasmids.

[0256] In some embodiments, the expression vector is an autonomously replicating vector (i.e., a vector that exists as an extra-chromosomal entity, the replication of which is independent of chromosomal replication, such as a plasmid, an extra-chromosomal element, a minichromosome, or an artificial chromosome). The vector may contain any means for assuring self-replication. In some alternative embodiments, the vector is one in which, when introduced into the host cell, it is integrated into the genome and replicated together with the chromosome(s) into which it has been integrated. Furthermore, in some embodiments, a single vector or plasmid, or two or more vectors or plasmids which together contain the total DNA to be introduced into the genome of the host cell, and/or a transposon is utilized.

[0257] In some embodiments, the expression vector contains one or more selectable markers, which permit easy selection of transformed cells. A “selectable marker” is a gene, the product of which provides for biocide or viral resistance, resistance to heavy metals, prototrophy to auxotrophs, and the like. Examples of bacterial selectable markers include, but are not limited to the dal genes from Bacillus subtilis or Bacillus licheniformis, or markers, which confer antibiotic resistance such as ampicillin, kanamycin, chloramphenicol or tetracycline resistance. Suitable markers for yeast host cells include, but are not limited to ADE2, HIS3, LEU2, LYS2, MET3, TRP1, and URA3. Selectable markers for use in filamentous fungal host cells include, but are not limited to, amdS (acetamidase; e.g., from A. nidulans or A. orzyae), argB (ornithine carbamoyltransferases), bar (phosphinothricin acetyltransferase; e.g., from S. hygroscopicus), hph (hygromycin phosphotransferase), niaD (nitrate reductase), pyrG (orotidine-5′-phosphate decarboxylase; e.g., from A. nidulans or A. orzyae), sC (sulfate adenyltransferase), and trpC (anthranilate synthase), as well as equivalents thereof.

[0258] In a further aspect, the present disclosure also provides a host cell comprising at least one polynucleotide encoding at least one recombinant reverse transcriptase polypeptide of the present invention, the polynucleotide(s) being operatively linked to one or more control sequences for expression of the recombinant reverse transcriptase enzyme(s) in the host cell. Host cells suitable for use in expressing the polypeptides encoded by the expression vectors of the present disclosure are well known in the art and include but are not limited to, bacterial cells, such as E. coli, Vibrio fluvialis, Streptomyces and Salmonella typhimurium cells; fungal cells, such as yeast cells (e.g., Saccharomyces cerevisiae or Pichia pastoris (ATCC Accession No. 201178)); insect cells such as Drosophila S2 and Spodoptera Sf9 cells; animal cells such as CHO, COS, BHK, 293, and Bowes melanoma cells; and plant cells. Exemplary host cells also include various Escherichia coli strains (e.g., W3110 (ΔfhuA) and BL21).

[0259] In another aspect, the present disclosure provides a method of producing the recombinant reverse transcriptase polypeptides, where the method comprises culturing a host cell capable of expressing a polynucleotide encoding the recombinant reverse transcriptase polypeptide under conditions suitable for expression of the polypeptide. In some embodiments, the methods further comprise the steps of isolating and/or purifying the DNA polymerase polypeptides, as described herein. In some embodiments, the host cell is a bacterial cell, such as E. coli. or B subtilis.

[0260] Appropriate culture media and growth conditions for host cells are well known in the art. It is contemplated that any suitable method for introducing polynucleotides for expression of the DNA polymerase polypeptides into cells will find use in the present invention. Suitable techniques include, but are not limited to electroporation, biolistic particle bombardment, liposome mediated transfection, calcium chloride transfection, and protoplast fusion.

[0261] Recombinant reverse transcriptase polypeptides with the properties disclosed herein can be obtained by subjecting the polynucleotide encoding the naturally occurring or recombinant reverse transcriptase polypeptide to any suitable mutagenesis and/or directed evolution methods known in the art, and/or as described herein. An exemplary directed evolution technique is mutagenesis and/or DNA shuffling (See e.g., Stemmer, Proc. Natl. Acad. Sci. USA, 1994, 91:10747-10751; WO 95/22625; WO 97/0078; WO 97/35966; WO 98/27230; WO 00/42651; WO 01/75767 and U.S. Pat. 6,537,746). Other directed evolution procedures that can be used include, among others, staggered extension process (StEP), in vitro recombination (See e.g., Zhao et al., Nat. Biotechnol., 1998, 16:258-261), mutagenic PCR (See e.g., Caldwell et al., PCR Methods Appl., 1994, 3:S136-S140), and cassette mutagenesis (See e.g., Black et al., Proc. Natl. Acad. Sci. USA, 1996, 93:3525-3529).

[0262] For example, mutagenesis and directed evolution methods can be readily applied to reverse transcriptase-encoding polynucleotides to generate variant libraries that can be expressed, screened, and assayed. Any suitable mutagenesis and directed evolution methods find use in the present invention and are well known in the art (See e.g., U.S. Pat. Nos. 5,605,793, 5,811,238, 5,830,721, 5,834,252, 5,837,458, 5,928,905, 6,096,548, 6,117,679, 6,132,970, 6,165,793, 6,180,406, 6,251,674, 6,265,201, 6,277,638, 6,287,861, 6,287,862, 6,291,242, 6,297,053, 6,303,344, 6,309,883, 6,319,713, 6,319,714, 6,323,030, 6,326,204, 6,335,160, 6,335,198, 6,344,356, 6,352,859, 6,355,484, 6,358,740, 6,358,742, 6,365,377, 6,365,408, 6,368,861, 6,372,497, 6,337,186, 6,376,246, 6,379,964, 6,387,702, 6,391,552, 6,391,640, 6,395,547, 6,406,855, 6,406,910, 6,413,745, 6,413,774, 6,420,175, 6,423,542, 6,426,224, 6,436,675, 6,444,468, 6,455,253, 6,479,652, 6,482,647, 6,483,011, 6,484,105, 6,489,146, 6,500,617, 6,500,639, 6,506,602, 6,506,603, 6,518,065, 6,519,065, 6,521,453, 6,528,311, 6,537,746, 6,573,098, 6,576,467, 6,579,678, 6,586,182, 6,602,986, 6,605,430, 6,613,514, 6,653,072, 6,686,515, 6,703,240, 6,716,631, 6,825,001, 6,902,922, 6,917,882, 6,946,296, 6,961,664, 6,995,017, 7,024,312, 7,058,515, 7,105,297, 7,148,054, 7,220,566, 7,288,375, 7,384,387, 7,421,347, 7,430,477, 7,462,469, 7,534,564, 7,620,500, 7,620,502, 7,629,170, 7,702,464, 7,747,391, 7,747,393, 7,751,986, 7,776,598, 7,783,428, 7,795,030, 7,853,410, 7,868,138, 7,783,428, 7,873,477, 7,873,499, 7,904,249, 7,957,912, 7,981,614, 8,014,961, 8,029,988, 8,048,674, 8,058,001, 8,076,138, 8,108,150, 8,170,806, 8,224,580, 8,377,681, 8,383,346, 8,457,903, 8,504,498, 8,589,085, 8,762,066, 8,768,871, 9,593,326, 9,665,694, 9,684,771, and all related PCT and non-US counterparts; Ling et al., Anal. Biochem., 1997, 254(2):157-78; Dale et al., Meth. Mol. Biol., 1996, 57:369-74; Smith, Ann. Rev. Genet., 1985, 19:423-462; Botstein et al., Science, 1985, 229:1193-1201; Carter, Biochem. J., 1986, 237:1-7; Kramer et al., Cell, 1984, 38:879-887; Wells et al., Gene, 1985, 34:315-323; Minshull et al., Curr. Op. Chem. Biol., 1999, 3:284-290; Christians et al., Nat. Biotechnol., 1999, 17:259-264; Crameri et al., Nature, 1998, 391:288-291; Crameri, et al., Nat. Biotechnol., 1997, 15:436-438; Zhang et al., Proc. Nat. Acad. Sci. U.S.A., 1997, 94:4504-4509; Crameri et al., Nat. Biotechnol., 1996, 14:315-319; Stemmer, Nature, 1994, 370:389-391; Stemmer, Proc. Nat. Acad. Sci. USA, 1994, 91:10747-10751; EP 3 049 973; WO 95/22625; WO 97/0078; WO 97/35966; WO 98/27230; WO 00/42651; WO 01/75767; WO 2009/152336; and WO 2015/048573, all of which are incorporated herein by reference).

[0263] In some embodiments, the protein variants obtained following mutagenesis treatment are screened by subjecting the enzyme preparations to a defined temperature (or other assay conditions) and measuring the amount of enzyme activity remaining after heat treatments or other suitable assay conditions. Clones containing a polynucleotide encoding a reverse transcriptase polypeptide are then isolated from the gene, sequenced to identify the nucleotide sequence changes (if any), and used to express the enzyme in a host cell. Measuring reverse transcriptase (e.g., DNA polymerase) activity from the expression libraries can be performed using any suitable methods known in the art (e.g., standard biochemistry and molecular techniques, such as RT-qPCR).

[0264] For engineered reverse transcriptase polypeptides of known sequence, the polynucleotides encoding the enzyme can be prepared by standard solid-phase methods, according to known synthetic methods. In some embodiments, fragments of up to about 100 bases can be individually synthesized, then joined (e.g., by enzymatic or chemical ligation methods, or polymerase mediated methods) to form any desired continuous sequence. For example, polynucleotides and oligonucleotides disclosed herein can be prepared by chemical synthesis using the classical phosphoramidite method (See e.g., Beaucage et al., Tet. Lett., 1981, 22:1859-69; and Matthes et al., EMBO J., 1984, 3:801-05), as it is typically practiced in automated synthetic methods. According to the phosphoramidite method, oligonucleotides are synthesized (e.g., in an automatic DNA synthesizer, purified, annealed, ligated and cloned in appropriate vectors).

[0265] Accordingly, in some embodiments, a method for preparing the recombinant reverse transcriptase polypeptide can comprise: (a) synthesizing a polynucleotide encoding a polypeptide comprising an amino acid sequence selected from the amino acid sequence of any variant as described herein, and (b) expressing the polypeptide encoded by the polynucleotide. In some embodiments of the method, the amino acid sequence encoded by the polynucleotide can optionally have one or several (e.g., up to 3, 4, 5, or up to 10) amino acid residue deletions, insertions and/or substitutions. In some embodiments, the amino acid sequence has optionally 1-2, 1-3, 1-4, 1-5, 1-6, 1-7, 1-8, 1-9, 1-10, 1-15, 1-20, 1-21, 1-22, 1-23, 1-24, 1-25, 1-30, 1-35, 1-40, 1-45, or 1-50 amino acid residue deletions, insertions and/or substitutions. In some embodiments, the amino acid sequence has optionally 1, 2, 3, 4, 5, 6, 7, 8, 9, 10, 11, 12, 13, 14, 15, 16, 17, 18, 19, 20, 21, 22, 23, 24, 25, 30, 30, 35, 40, 45, or 50 amino acid residue deletions, insertions and/or substitutions. In some embodiments, the amino acid sequence has optionally 1, 2, 3, 4, 5, 6, 7, 8, 9, 10, 11, 12, 13, 14, 15, 16, 18, 20, 21, 22, 23, 24, or 25 amino acid residue deletions, insertions and/or substitutions. In some embodiments, the substitutions are conservative or non-conservative substitutions.

[0266] The expressed recombinant reverse transcriptase polypeptide can be evaluated for any desired improved property or combination of properties (e.g., activity, selectivity, fidelity, processivity, stability, thermostability, tolerance to various pH levels, etc.) using any suitable assay known in the art, including but not limited to the assays and conditions described herein.

[0267] In some embodiments, any of the recombinant reverse transcriptase polypeptides expressed in a host cell are recovered from the cells and/or the culture medium using any one or more of the well-known techniques for protein purification, including, among others, lysozyme treatment, sonication, filtration, salting-out, ultra-centrifugation, and chromatography.

[0268] Chromatographic techniques for isolation of the DNA polymerase polypeptides include, among others, reverse phase chromatography, high-performance liquid chromatography, ion-exchange chromatography, hydrophobic-interaction chromatography, size-exclusion chromatography, gel electrophoresis, and affinity chromatography. Conditions for purifying a particular enzyme depends, in part, on factors such as net charge, hydrophobicity, hydrophilicity, molecular weight, molecular shape, etc., and will be apparent to those having skill in the art. In some embodiments, affinity techniques may be used to isolate the improved reverse transcriptase enzymes. For affinity chromatography purification, any antibody that specifically binds a reverse transcriptase polypeptide of interest may find use. For the production of antibodies, various host animals, including but not limited to rabbits, mice, rats, etc., are immunized by injection with a reverse transcriptase polypeptide, or a fragment thereof. In some embodiments, the reverse transcriptase polypeptide or fragment is attached to a suitable carrier, such as BSA, by means of a side chain functional group or linkers attached to a side chain functional group.

[0269] In some embodiments, the isolated or purified recombinant reverse transcriptase polypeptides are combined with other ingredients and compounds to provide compositions and formulations comprising the recombinant reverse transcriptase polypeptide as appropriate for different applications and uses (e.g., diagnostic methods and compositions). In some embodiments, a composition comprises at least one recombinant reverse transcriptase of the present disclosure. In some embodiments, the composition further comprises a buffer. In some embodiments, the composition further comprises a substrate, such as a nucleotide substrates (e.g., dNTPs) and/or at least one primer, e.g., complementary to a target RNA. In some embodiments, the composition can further comprise a DNA polymerase (e.g., a second DNA polymerase) other than the reverse transcriptase. In some embodiments, the second DNA polymerase is a thermostable DNA polymerase, for example Taq or Pfu polymerase, useful in RT-PCR coupled reactions. In some embodiments, the composition includes a probe or indicator, such as a nucleic acid binding dye (e.g., SYBR® Green), for detecting and/or quantitating the amount of product formed, e.g., in a qRT-PCR reaction.

### Uses of Recombinant Reverse Transcriptase Polypeptides and Kits

[0270] In another aspect, the present disclosure provides uses of the recombinant reverse transcriptase for diagnostic and molecular biological applications, such as for detecting the presence of a target RNA, preparing cDNA libraries, and direct/indirect sequence of nucleic acids.

[0271] In some embodiments, the recombinant reverse transcriptase is used in preparing a complementary DNA of a target RNA. In some embodiments, a method of preparing a complementary DNA of a target RNA comprises contact a target RNA with a recombinant reverse transcriptase described herein in presence of substrates sufficient for producing a complementary DNA under reaction conditions suitable for production of a complementary DNA to all or a portion of the target RNA. As discussed herein and known in the art, substrates include nucleotides (e.g., dNTPs) for DNA polymerase activity and/or oligonucleotide primers. Primers can be to a specific sequence of the target RNA, or random primers, such as for generation of cDNA libraries.

[0272] In some embodiments, the target RNA is any RNA appropriate as a template for reverse transcriptase, including, but not limited to, messenger RNA (mRNA), non-coding RNA (ncRNA), micro-RNA (miRNA), bacterial RNA, fungal RNA, or viral RNA.

[0273] In some embodiments, the recombinant reverse transcriptase is useful in diagnostic applications, e.g., for detecting the presence of a target RNA. In some embodiments, a method for detecting presence of a target RNA comprises reacting a sample suspected of containing a target RNA with a recombinant reverse transcriptase of described herein in presence of substrates under conditions suitable for reverse transcriptase mediated production of a DNA complementary to all or a portion of the target RNA, and detecting the presence of the complementary DNA. In some embodiments, the target RNA can be messenger RNA (mRNA), non-coding RNA (ncRNA), micro-RNA (miRNA), bacterial RNA, fungal RNA, or viral RNA.

[0274] In some embodiments, the sample can be any material or substance suspected of containing a target RNA. In some embodiments, the sample is a biological sample, such as biopsy and autopsy samples, frozen sections taken for histological purposes, blood, plasma, serum, sputum, stool, tears, mucus, hair, skin, etc. In some embodiments, the biological sample are cells or viruses, such as from a bacterial culture, virus culture, or cell culture. In some embodiments, the sample is an environmental sample, such as from water, sewage, surfaces, air, filtrates, etc.

[0275] In some embodiments for detecting a target RNA, the detection of the complementary DNA product can be effectuated by known methods in the art. In some embodiments, the complementary DNA is detected by amplifying the complementary DNA, such as by polymerase chain reaction (PCR) or isothermal amplification. In some embodiments, a suitable isothermal amplification is by loop mediated isothermal amplification (LAMP). In some embodiments for detecting the presence of a target RNA, the reverse transcription reaction is conducted separately from the amplification reaction. In some embodiments, where the amplification is by PCR, the reverse transcriptase reaction and the PCR is a one-step RT-PCR (i.e., performed in a single reaction simultaneously). In some embodiments, where the amplification is by PCR, the reverse transcriptase reaction and the PCR is a two-step RT-PCR (i.e., performed separately).

[0276] In some embodiments, the recombinant reverse transcriptase is used for sequencing nucleic acids. In some embodiments, the recombinant reverse transcriptase is used for indirectly sequencing a target RNA by preparing a complementary DNA, and sequencing the resulting complementary DNA. Various methods for sequencing DNA, particularly NGS sequencing methods, are well known in the art.

[0277] In a further aspect, the present disclosure provides a kit comprising at least one recombinant reverse transcriptase disclosed herein. In some embodiments, the kit further comprises one or more of a buffer, a nucleotide substrate, and/or an oligonucleotide primer. In some embodiments, the kit can include multiple (e.g., two or more) oligonucleotide primers, for example to different portions of a target RNA. In some embodiments, the kit comprises a second DNA polymerase, e.g., for coupled RT-PCR reaction. In some embodiments, the second DNA polymerase comprises a thermostable DNA polymerase, such as a Taq or Pfu DNA polymerase.

### EXAMPLES

[0278] The following Examples, including experiments and results achieved, are provided for illustrative purposes only and are not to be construed as limiting the present invention.

[0279] In the experimental disclosure below, where applicable, the following abbreviations apply: ppm (parts per million); M (molar); mM (millimolar), uM and μM (micromolar); nM (nanomolar); mol (moles); gm and g (gram); mg (milligrams); ug and μg (micrograms); L and 1 (liter); ml and mL (milliliter); cm (centimeters); mm (millimeters); um and μm (micrometers); sec. (seconds); min(s) (minute(s)); h(s) and hr(s) (hour(s)); Ω (ohm); μf (microfarad); U (units); MW (molecular weight); rpm (rotations per minute); CT (critical threshold); rcf (relative centrifugal force); psi and PSI (pounds per square inch); nt (nucleotide); aa (amino acid); ° C. (degrees Centigrade); rt (room temperature); RT (reverse transcriptase); PCR (polymerase chain reaction); NGS (next-generation sequencing); ds (double stranded); ss (single stranded); CDS (coding sequence); RT-qPCR (quantitative reverse transcription PCR); DNA (deoxyribonucleic acid); cDNA (complementary DNA); RNA (ribonucleic acid); E. coli W3110 (commonly used laboratory E. coli strain, available from the Coli Genetic Stock Center [CGSC], New Haven, CT); HTP (high throughput); HPLC (high pressure liquid chromatography); MCYP (microcyp); ddH2O (double distilled water); PBS (phosphate buffered saline); BSA (bovine serum albumin); DTT (dithiothreitol); CAM (chloramphenicol); CAT (chloramphenicol acetyltransferase); IPTG (isopropyl β-D-1-thiogalactopyranoside); GFP (green fluorescent protein); eGFP (enhanced GFP); DsRed (red fluorescent protein isolated from Discosoma sp.); FIOPC (fold improvements over positive control); LB (Luria-Bertani); SPRI (solid phase reversible immobilization); Sigma-Aldrich (Sigma-Aldrich, St. Louis, Mo.); Perkin Elmer (Perkin Elmer, Inc, Waltham, Mass.); Harvard Apparatus (Harvard Apparatus, Holliston, Mass.); Millipore (Millipore, Corp., Billerica Mass.); Covaris (Covaris, Inc., Woburn, Mass.); MagBio (MagBio Genomics, Inc., Gaithersburg, Md.); Qiagen (Qiagen Inc., Germantown, Md.); Illumina (Illumina, Inc., San Diego, Calif.); BD Biosciences (BD Biosciences, San Jose, Calif.); Difco (Difco Laboratories, BD Diagnostic Systems, Detroit, Mich.); Kuhner (Adolf Kuhner, AG, Basel, Switzerland); Zymo (Zymo Research, Irvine, Calif.); Agilent (Agilent Technologies, Inc., Santa Clara, Calif.); Thermo Scientific (part of Thermo Fisher Scientific, Waltham, Mass.); GE Healthcare (GE Healthcare Bio-Sciences, Piscataway, N.J.); and Bio-Rad (Bio-Rad Laboratories, Hercules, Calif.).

### Example 1: E. coli Expression Hosts Containing Recombinant Reverse transcriptase (RT) Genes

[0280] The initial reverse transcriptase enzyme used to produce the variants of the present invention was SEQ ID NO: 2 cloned into the expression vector pCK110900 (See, FIG. 3 of US Patent Publication No. 2006/0195947) operatively linked to the lac promoter under control of the lacl repressor. The expression vector also contains the P15a origin of replication and the chloramphenicol resistance gene. The resulting plasmids were transformed into E. coli W3110, using standard methods known in the art. The transformants were isolated by subjecting the cells to chloramphenicol selection, as known in the art (see, e.g., U.S. Pat. No. 8,383,346 and WO2010/144103).

### Example 2: Preparation of HTP Reverse Transcriptase (RT) -Containing Wet Cell Pellets

[0281] E. coli cells containing recombinant RT-encoding genes from monoclonal colonies were inoculated into 180 μl LB containing 1% glucose and 30 μg/mL chloramphenicol (CAM) in the wells of 96-well, shallow-well microtiter plates. The plates were sealed with O₂-permeable seals, and cultures were grown overnight at 30° C., 200 rpm, and 85% humidity. Then, 10 μl of each of the cell cultures were transferred into the wells of 96-well, deep-well plates containing 390 mL TB and 30 μg/mL CAM. The deep-well plates were sealed with O₂-permeable seals and incubated at 30° C., 250 rpm, and 85% humidity until OD₆₀₀ 0.6-0.8 was reached. The cell cultures were then induced by IPTG to a final concentration of 1 mM and incubated overnight under the same conditions as originally used. The cells were then pelleted using centrifugation at 4,000 rpm for 10 min. The supernatants were discarded, and the pellets were frozen at −80° C. prior to lysis.

### Example 3: Preparation of HTP RT -Containing Cell Lysates

[0282] First, 200 μl buffer containing 50 mM Tris-HCl pH 7.5 and 20 mM sodium chloride, were added to the cell paste in each well, produced as described in Example 2. The cells were resuspended by shaking on a bench top shaker. Resuspended cells were transferred to a 96 well Hard shell plate and lysed at 80° C. for 60 min. in a thermocycler. The plate was then centrifuged for 15 min at 4,000 rpm and 4° C. The clear supernatants were used in biocatalytic reactions to determine their activity, RNA sensitivity, and thermostability levels.

### Example 4: Improvements over SEQ ID NO: 2 in Reverse Transcriptase Activity

[0283] The polypeptide of SEQ ID NO: 2 was selected as the parent enzyme after screening wild type reverse transcriptase enzymes in a RT-qPCR assay using Sars-Cov2 RNA fragment and N1 primers and probe from the CDC EUA assay. Libraries of engineered genes were produced using well established techniques (e.g., saturation mutagenesis, recombination of previously identified beneficial mutations). The polypeptides encoded by each gene were produced in HTP as described in Example 2, and the soluble lysate was generated as described in Example 3. Each variant was screened in a 20 μL reaction that comprised 0.05-1 ng/uL SARS-CoV2 RNA fragment containing the transcript of the nucleocapsid gene, 500 nM N1 primers, 125 nM probe (CDC EUA assay, Catalog #2019-nCoVEUA-01), 0.2 mM dNTPs, RT buffer (10 mM Tris-HCl, 50 mM KCl, 1.5 mM MgCl₂), 0.015 vol % RT HTP lysate, incubated at 62.5C for 30 min. After the incubation at 62.5° C. for 30 min, an engineered thermal DNA polymerase (SEQ ID NO: 567) was added to a final concentration of 20 ng/uL and qPCR cycling performed (95° C. 2 min, 95° C. 3 sec, 55° C. 30 sec for 45 cycles) in a CFX384 Touch Real-Time PCR detection System (BioRad).

[0284] Activity relative to SEQ ID NO: 2 (Activity Fold Improvement Over Parent or FIOP) was calculated as the inverse of Ct value (critical threshold) formed by the variant over the inverse of Ct value of SEQ ID NO: 2 and shown in Table 4.1.

TABLE 4.1
Activity of Variants Relative to SEO ID NO: 2

| | Amino Acid Differences | Activity FIOP 1 |
|---|---|---|
| SEQ ID NO: | (Relative to | (Relative to |
| (nt/aa) | SEQ ID NO: 2) | SEQ ID NO: 2) |
| 1/2 | Wild type | + |
| 3/4 | R114K/I210L/T307K | + |
| 5/6 | R114K/A309P | + |
| 7/8 | A49G | + |
| 9/10 | Q63P/A68S/H216R/E258T/D261N | + |
| 11/12 | Q63P/A68S/H216R/D261N | + |
| 13/14 | Q63L/T209A/E314K/D665N | + |
| 15/16 | I447G/D665N | + |
| 17/18 | T331E | + |
| 19/20 | V90I/T307K/A349G | + |
| 21/22 | R114K/H173A/T331E | + |
| 23/24 | A266V | + |

1 Levels of increased activity were determined relative to the reference polypeptide of SEQ ID NO: 2, and defined as follows: “+” > than 1-fold but less than 2.0-fold increased activity; “++” > than 2.0-fold but less than 4-fold increased activity; and “+++” > than 4-fold increased activity

### Example 5: Improvements Over SEQ ID NO: 24 in RNA Sensitivity

[0285] SEQ ID NO: 24 was selected as the parent enzyme for this round of directed evolution. Libraries of engineered genes were produced using well established techniques (e.g., saturation mutagenesis, recombination of previously identified beneficial mutations). The polypeptides encoded by each gene were produced in HTP as described in Example 2, and the soluble lysate was generated as described in Example 3. Each variant was screened in a 20 ⱼut reaction that comprised 0.03 ng/uL SARS-CoV2 RNA fragment containing the transcript of the nucleocapsid gene, 500 nM N1 primers, 125 nM probe (CDC EUA assay, Catalog #2019-nCoVEUA-01), 0.2 mM dNTPs, RT buffer (10 mM Tris-HCl, 50 mM KCl, 1.5 mM MgCl₂), 0.625 vol % RT HTP lysate, 20 ng/uL engineered thermal DNA Polymerase (SEQ ID NO: 568) and RT-qPCR performed by incubation at 62.5° C. for 30 min followed by qPCR cycling (95° C. 2 min, 95° C. 3 sec, 55° C. 30 sec for 45 cycles) in a CFX384 Touch Real-Time PCR detection System (BioRad).

[0286] RNA sensitivity relative to SEQ ID NO:24 (Sensitivity FIOP) was calculated as the inverse of Ct value (critical threshold) formed by the variant over the inverse of Ct value of SEQ ID NO:24 and shown in Table 5.1.

TABLE 5.1
RNA sensitivity of Variants Relative to SEQ ID NO: 24

| | Amino Acid | Amino Acid | Sensitivity |
|---|---|---|---|
| SEQ ID | Differences | Differences | FIOP ¹ |
| NO: | (Relative to | (Relative to | (Relative to |
| (nt/aa) | SEQ ID NO: 24) | SEQ ID NO: 2) | SEQ ID NO: 24) |
| 25/26 | N454A/H508L | A266V/N454A/H508L | ++ |
| 27/28 | D536E/E574Q | A266V/D536E/E574Q | + |
| 29/30 | A309P | A266V/A309P | + |
| 31/32 | A49G/H173A/A309P/T331E | A49G/H173A/A266V/A309P/ | + |
| | | T331E | |
| 33/34 | V90I/T331E | V90I/A266V/T331E | + |
| 35/36 | Q63L/V90I/A309P/E574D/ | Q63L/V90I/A266V/A309P/ | + |
| | H650G | E574D/H650G | |
| 37/38 | V90I/H173A/T209A/I210L/ | V90I/H173A/T209A/I210L/ | + |
| | F321A/E574D/Y598S | A266V/F321A/E574D/Y598S | |
| 39/40 | H508L/K519P | A266V/H508L/K519P | + |
| 41/42 | A49G/Q63L/V90I/H216R/ | A49G/Q63L/V90I/H216R/ | + |
| | A309P/F321A/D536E/E574D | A266V/A309P/F321A/D536E/ | |
| | | E574D | |
| 43/44 | A49G/R114K/T307N/A309P/ | A49G/R114K/A266V/T307N/ | + |
| | D536E | A309P/D536E | |
| 45/46 | T307K/F321A/D536E/E574D/ | A266V/T307K/F321A/D536E/ | + |
| | H650G | E574D/H650G | |
| 47/48 | A309P/T331E/D536E/E574Q/ | A266V/A309P/T331E/D536E/ | + |
| | Y598S/H650G | E574Q/Y598S/H650G | |
| 49/50 | H173A/T331E/D536E/E574D/ | H173A/A266V/T331E/D536E/ | + |
| | Y598S | E574D/Y598S | |
| 51/52 | A49G/V300I/P403H | A49G/A266V/V300I/P403H | + |
| 53/54 | R74K/G242A | R74K/G242A/A266V | + |
| 55/56 | G242A/K298E/H508L/Q662R | G242A/A266V/K298E/H508L/ | + |
| | | Q662R | |
| 57/58 | S260G/Q509E | S260G/A266V/Q509E | + |
| 59/60 | V102C/A370G/Q509E | V102C/A266V/A370G/Q509E | + |
| 61/62 | A49G/H173A/H216R/A349G/ | A49G/H173A/H216R/A266V/ | + |
| | D536E/Y598S | A349G/D536E/Y598S | |
| 63/64 | A49G/R114K/H216R/T307K/ | A49G/R114K/H216R/A266V/ | + |
| | A309P/T331E | T307K/A309P/T331E | |
| 65/66 | A49G/V90I/H173A/H216R/ | A49G/V90I/H173A/H216R/ | + |
| | T307K | A266V/T307K | |
| 67/68 | Q63P/A68S/E81K/F167Y/ | Q63P/A68S/E81K/F167Y/ | + |
| | E314A/I447G/E574Q | A266V/E314A/I447G/E574Q | |
| 69/70 | A49G/I210L/T307K/A309P/ | A49G/I210L/A266V/T307K/ | + |
| | F321A/D536E/E574D/H650G | A309P/F321A/D536E/E574D/ | |
| | | H650G | |
| 71/72 | Q63L/V90I/T307K/F321A/ | Q63L/V90I/A266V/T307K/ | + |
| | T331E/G537W/Y598S | F321A/T331E/G537W/Y598S | |
| 73/74 | A370G/M464L/T465S/Q509E/ | A266V/A370G/M464L/T465S/ | + |
| | D554T/M576I | Q509E/D554T/M576I | |
| 75/76 | A49G/R114K/H173A/H216R/ | A49G/R114K/H173A/H216R/ | + |
| | F321A/E574D/Y598S | A266V/F321A/E574D/Y598S | |
| 77/78 | V90I/H216R/F321A/H650G | V90I/H216R/A266V/F321A/ | + |
| | | H650G | |
| 79/80 | E574D/H650G | A266V/E574D/H650G | + |
| 81/82 | A49G/T209A/I210L/T307K/ | A49G/T209A/I210L/A266V/ | + |
| | A309P/D536E/Y598S | T307K/A309P/D536E/Y598S | |
| 83/84 | H216R/D536E/E574Q | H216R/A266V/D536E/E574Q | + |
| 85/86 | A49G/H173A/I210L/A309P/ | A49G/H173A/I210L/A266V/ | + |
| | F321A/D536E/Y598S | A309P/F321A/D536E/Y598S | |
| 87/88 | T331E/D536E/Y598S | A266V/T331E/D536E/Y598S | + |
| 89/90 | F321A/E574D | A266V/F321A/E574D | + |
| 91/92 | H173A/F321A/T331E/A349G/ | H173A/A266V/F321A/T331E/ | + |
| | E574D | A349G/E574D | |
| 93/94 | A49G/T307K/D536E | A49G/A266V/T307K/D536E | + |
| 95/96 | H216R/A309P/E574D/H650G | H216R/A266V/A309P/E574D/ | + |
| | | H650G | |
| 97/98 | I94L/A370G/S474A/M576I | I94L/A266V/A370G/S474A/ | + |
| | | M576I | |
| 99/100 | V90I/T209A/I210L/A309P/ | V90I/T209A/I210L/A266V/ | + |
| | F321A/E574D | A309P/F321A/E574D | |
| 101/102 | A49G/Q63L/V90I/H173A | A49G/Q63L/V90I/H173A/ | + |
| | | A266V | |
| 103/104 | K298E | A266V/K298E | + |
| 105/106 | A49G/V300I/N454A/Q662R | A49G/A266V/V300I/N454A/ | + |
| | | Q662R | |
| 107/108 | A68S/E81K/F167Y/K298R/ | A68S/E81K/F167Y/A266V/ | + |
| | D536N | K298R/D536N | |
| 109/110 | A49G/N454A | A49G/A266V/N454A | + |
| 111/112 | E81K | E81K/A266V | + |
| 113/114 | A49G/R114K/H173A/A309P/ | A49G/R114K/H173A/A266V/ | + |
| | A349G/D536E/E574D/H650G | A309P/A349G/D536E/E574D/ | |
| | | H650G | |
| 115/116 | F167Y/D261N/I303Q/D536N | F167Y/D261N/A266V/I303Q/ | + |
| | | D536N | |
| 117/118 | D18E/V102C/D554T | D18E/V102C/A266V/D554T | + |
| 119/120 | R171L/H173A/T307K/T331E/ | R171L/H173A/A266V/T307K/ | + |
| | D536E | T331E/D536E | |
| 121/122 | H173A/H216R/D536E | H173A/H216R/A266V/D536E | + |
| 123/124 | D18E/A370G/M464L/Q509E | D18E/A266V/A370G/M464L/ | + |
| | | Q509E | |
| 125/126 | A49G/R114K | A49G/R114K/A266V | + |
| 127/128 | V90I/H216R/A309P/D536G/ | V90I/H216R/A266V/A309P/ | + |
| | E574D | D536G/E574D | |
| 129/130 | I444L | A266V/I444L | + |
| 131/132 | V90I/F321A/A349G/D536G/ | V90I/A266V/F321A/A349G/ | + |
| | Y598S/H650G | D536G/Y598S/H650G | |
| 133/134 | A49G/L163P/A309P/F321A/ | A49G/L163P/A266V/A309P/ | + |
| | D536E/E574D/H650G | F321A/D536E/E574D/H650G | |
| 135/136 | A49G/Q63L/V90I/H173A/ | A49G/Q63L/V90I/H173A/A266V/ | + |
| | T307K/T331E/D536E/Y598S/ | T307K/T331E/D536E/Y598S/ | |
| | H650G | H650G | |
| 137/138 | A68S/E81K/F167Y/E258T/ | A68S/E81K/F167Y/E258T/ | + |
| | I447G/N466K/D536N | A266V/I447G/N466K/D536N | |
| 139/140 | V90I/T331E/E574D | V90I/A266V/T331E/E574D | + |
| 141/142 | A49G/F321A | A49G/A266V/F321A | + |
| 143/144 | I94L/Q509E | I94L/A266V/Q509E | + |
| 145/146 | V90I/H173A/F321A/D536E | V90I/H173A/A266V/F321A/ | + |
| | | D536E | |
| 147/148 | F167Y/K298R/I447G/N466K | F167Y/A266V/K298R/I447G/ | + |
| | | N466K | |
| 149/150 | H173A/H216R/T307K/A309P/ | H173A/H216R/A266V/T307K/ | + |
| | D536E | A309P/D536E | |
| 151/152 | H216R/F321A | H216R/A266V/F321A | + |
| 153/154 | A49G/V90I/H173A/T209A/ | A49G/V90I/H173A/T209A/ | + |
| | A309P/T331E | A266V/A309P/T331E | |
| 155/156 | D261N/K298R/I303Q/I447R/ | D261N/A266V/K298R/I303Q/ | + |
| | E574Q | I447R/E574Q | |
| 157/158 | R171P/K298E/I444L/K519P | R171P/A266V/K298E/I444L/ | + |
| | | K519P | |
| 159/160 | V90I/D536E/E574D/Y598S/ | V90I/A266V/D536E/E574D/ | + |
| | H650G | Y598S/H650G | |
| 161/162 | A49G/Q63L/V90I/I210L/ | A49G/Q63L/V90I/I210L/A266V/ | + |
| | T307K/F321A/Y598S/H650G | T307K/F321A/Y598S/H650G | |
| 163/164 | V90I/H216R/T307K/D536E/ | V90I/H216R/A266V/T307K/ | + |
| | E574D | D536E/E574D | |
| 165/166 | D18E/I94L/V102C/S260G/ | D18E/I94L/V102C/S260G/ | + |
| | A370G/M464L/D554T | A266V/A370G/M464L/D554T | |
| 167/168 | D18E/K423R/T465S/S474A | D18E/A266V/K423R/T465S/ | + |
| | | S474A | |
| 169/170 | F167Y/D261N/I447G/D536G | F167Y/D261N/A266V/I447G/ | + |
| | | D536G | |
| 171/172 | R114K/H173A/T209A/I210L | R114K/H173A/T209A/I210L/ | + |
| | | A266V | |
| 173/174 | T307K/A309P/D536E/E574D/ | A266V/T307K/A309P/D536E/ | + |
| | Y598S | E574D/Y598S | |
| 175/176 | V102C/S260G/A370G/M576I | V102C/S260G/A266V/A370G/ | + |
| | | M576I | |
| 177/178 | E574D | A266V/E574D | + |
| 179/180 | H173A/T209A/I210L/T307K/ | H173A/T209A/I210L/A266V/ | + |
| | D536E | T307K/D536E | |
| 181/182 | H216R/A309P/D536E | H216R/A266V/A309P/D536E | + |
| 183/184 | A349G | A266V/A349G | + |
| 185/186 | I447L/D536A/H606Q | A266V/I447L/D536A/H606Q | + |
| 187/188 | K310R/N454A/E479D/K519P/ | A266V/K310R/N454A/E479D/ | + |
| | Q662R | K519P/Q662R | |
| 189/190 | A49G/V90I/T209A/Y598S | A49G/V90I/T209A/A266V/ | + |
| | | Y598S | |
| 191/192 | E314K/D536N | A266V/E314K/D536N | + |
| 193/194 | R171P/V300I/N454A/E479D/ | R171P/A266V/V300I/N454A/ | + |
| | H508L/Q662R | E479D/H508L/Q662R | |
| 195/196 | R171P/G242A/V300I/H508L/ | R171P/G242A/A266V/V300I/ | + |
| | Q662R | H508L/Q662R | |
| 197/198 | A49G/T331E/D536E | A49G/A266V/T331E/D536E | + |
| 199/200 | H173A/H216R/A309P/D536E/ | H173A/H216R/A266V/A309P/ | + |
| | E574D/Y598S | D536E/E574D/Y598S | |
| 201/202 | D536E/Y598S | A266V/D536E/Y598S | + |
| 203/204 | F167Y/D261N/K298R/I303Q/ | F167Y/D261N/A266V/K298R/ | + |
| | I447R/N466K/E574Q | I303Q/I447R/N466K/E574Q | |
| 205/206 | H173A/D536E/Y598S | H173A/A266V/D536E/Y598S | + |
| 207/208 | A49G/R114K/A309P/D536E/ | A49G/R114K/A266V/A309P/ | + |
| | E574D/Y598S | D536E/E574D/Y598S | |
| 209/210 | A49G/R114K/A309P/A349G/ | A49G/R114K/A266V/A309P/ | + |
| | D536E | A349G/D536E | |
| 211/212 | Q63P/A68S/E81K/I303Q/ | Q63P/A68S/E81K/A266V/ | + |
| | N466K | I303Q/N466K | |
| 213/214 | Q63L/V90I/T209A/H216R/ | Q63L/V90I/T209A/H216R/ | + |
| | T307K/A309P/F321A/A349G/ | A266V/T307K/A309P/F321A/ | |
| | D536E/E574D/Y598S/H650G | A349G/D536E/E574D/Y598S/ | |
| | | H650G | |
| 215/216 | H216R | H216R/A266V | + |
| 217/218 | H173A/I210L/T307K/Y598S/ | H173A/I210L/A266V/T307K/ | + |
| | H650G | Y598S/H650G | |
| 219/220 | S25E/V102C/A370G/K423R | S25E/V102C/A266V/A370G/ | + |
| | | K423R | |
| 221/222 | A68S/D261N/K298R/I303Q | A68S/D261N/A266V/K298R/ | + |
| | | I303Q | |
| 223/224 | K423R/S474A | A266V/K423R/S474A | + |
| 225/226 | I94L/K423R/S474A/D554T/ | I94L/A266V/K423R/S474A/ | + |
| | M576I | D554T/M576I | |
| 227/228 | Q63P/K298R/I447R/E574Q | Q63P/A266V/K298R/I447R/ | + |
| | | E574Q | |
| 229/230 | A49G/Q63L/V90I/H173A/ | A49G/Q63L/V90I/H173A/ | + |
| | T307K/F321A/T331E/E574D/ | A266V/T307K/F321A/T331E/ | |
| | D595N/H650G | E574D/D595N/H650G | |
| 231/232 | A49G/V90I/D536E/E574D | A49G/V90I/A266V/D536E/ | + |
| | | E574D | |
| 233/234 | H508L | A266V/H508L | + |
| 235/236 | Q63P/E81K/F167Y/E258T/ | Q63P/E81K/F167Y/E258T/ | + |
| | D261N/K298R/I303Q/I447G | A266V/D261N/K298R/I303Q/ | |
| | | I447G | |
| 237/238 | R114K/T331E | R114K/A266V/T331E | + |
| 239/240 | D212N/K298E/R583K/H606K | D212N/A266V/K298E/R583K/ | + |
| | | H606K | |
| 241/242 | A49G/H173A/D536E/E574Q | A49G/H173A/A266V/D536E/ | + |
| | | E574Q | |
| 243/244 | A49G/G242A/K298E/V3W | A49G/G242A/A266V/K298E/ | + |
| | K310R/I444L/N454A/E479D | V300I/K310R/I444L/N454A/ | |
| | | E479D | |
| 245/246 | A49G/A309P/F321A/D536E/ | A49G/A266V/A309P/F321A/ | + |
| | Y598S | D536E/Y598S | |
| 247/248 | Q63P/A68S/D261N/D536G | Q63P/A68S/D261N/A266V/ | + |
| | | D536G | |
| 249/250 | V300I/I444L/H508L | A266V/V300I/I444L/H508L | + |
| 251/252 | K298R | A266V/K298R | + |

¹ Levels of increased activity were determined relative to the reference polypeptide of SEQ ID NO: 24, and defined as follows: “+” > than 1-fold but less than 2.0-fold increased activity; “++” > than 2.0-fold but less than 4-fold increased activity; and “+++” > than 4-fold increased activity.

### Example 6: Improvements Over SEQ ID NO: 94 in RNA Sensitivity and Reverse Transcriptase Activity

[0287] SEQ ID NO: 94 was selected as the parent enzyme for this round of directed evolution. Libraries of engineered genes were produced using well established techniques (e.g., saturation mutagenesis, recombination of previously identified beneficial mutations). The polypeptides encoded by each gene were produced in HTP as described in Example 2, and the soluble lysate was generated as described in Example 3. Each variant was screened in a 20 μL reaction that comprised 0.00078 ng/uL SARS-CoV2 RNA fragment containing the transcript of the nucleocapsid gene, 500 nM N1 primers, 125 nM probe (CDC EUA assay, Catalog #2019-nCoVEUA-01), 0.2 mM dNTPs, RT buffer (10 mM Tris-HCl, 50 mM KCl, 1.5 mM MgCl₂), 2.5 vol % RT HTP lysate, 20 ng/uL engineered thermal DNA Polymerase (SEQ ID NO: 569) and RT-qPCR performed by incubation at 62.5° C. for 30 min followed by qPCR cycling (95° C. 2 min, 95° C. 3 sec, 55° C. 30 sec for 45 cycles) in a CFX384 Touch Real-Time PCR detection System (BioRad).

[0288] RNA sensitivity relative to SEQ ID NO: 94 (Sensitivity FIOP) was calculated as the inverse of Ct value (critical threshold) formed by the variant over the inverse of Ct value of SEQ ID NO: 94 and shown in Table 6.1.

[0289] Variants with improved RNA sensitivity were re-screened at the following conditions: each variant was screened in a 20 ⱼut reaction that comprised 0.25 ng/uL SARS-CoV2 RNA fragment containing the transcript of the nucleocapsid gene, 500 nM N1 primers, 125 nM probe (CDC EUA assay, Catalog #2019-nCoVEUA-01), 0.2 mM dNTPs, RT buffer (10 mM Tris-HCl, 50 mM KCl, 1.5 mM MgCl₂), 0.004 vol % RT HTP lysate, incubated at 62.5° C. for 30 min. After the incubation at 62.5° C. for 30 min, engineered thermal DNA polymerase (SEQ ID NO: 569) was added to a final concentration of 20 ng/uL and qPCR cycling performed (95° C. 2 min, 95° C. 3 sec, 55° C. 30 sec for 45 cycles) in a CFX384 Touch Real-Time PCR detection System (BioRad).

[0290] Activity relative to SEQ ID NO: 94 (Activity Fold Improvement Over Parent or FIOP) was calculated as the inverse of Ct value (critical threshold) formed by the variant over the inverse of Ct value of SEQ ID NO: 94 and shown in Table 6.1.

TABLE 6.1
Activity and Stability of Variants Relative to SEQ ID NO: 94

| | Amino Acid | Amino Acid | RNA sensitivity | Activity |
|---|---|---|---|---|
| SEQ ID | Differences | Differences | FIOP ¹ | FIOP ² |
| NO: | (Relative to | (Relative to | (Relative to | (Relative to |
| (nt/aa) | SEQ ID NO: 94) | SEQ ID NO: 2) | SEQ ID NO: 94) | SEQ ID NO: 94) |
| 253/254 | V134P | A49G/V134P/A266V/T307K/ | + | + |
| | | D536E | | |
| 255/256 | R74P | A49G/R74P/A266V/T307K/ | + | + |
| | | D536E | | |
| 257/258 | Q83A | A49G/Q83A/A266V/T307K/ | + | + |
| | | D536E | | |
| 259/260 | A319G | A49G/A266V/T307K/A319G/ | + | + |
| | | D536E | | |
| 261/262 | R92T | A49G/R92T/A266V/T307K/ | + | + |
| | | D536E | | |
| 263/264 | F329S | A49G/A266V/T307K/F329S/ | + | + |
| | | D536E | | |
| 265/266 | K343A | A49G/A266V/T307K/K343A/ | + | + |
| | | D536E | | |
| 267/268 | Q311P | A49G/A266V/T307K/Q311P/ | + | + |
| | | D536E | | |
| 269/270 | P338V | A49G/A266V/T307K/P338V/ | + | + |
| | | D536E | | |
| 271/272 | T196C | A49G/T196C/A266V/T307K/ | + | + |
| | | D536E | | |
| 273/274 | T69R | A49G/T69R/A266V/T307K/ | + | + |
| | | D536E | | |
| 275/276 | S72M | A49G/S72M/A266V/T307K/ | + | + |
| | | D536E | | |
| 277/278 | E294Q | A49G/A266V/E294Q/T307K/ | + | + |
| | | D536E | | |
| 279/280 | Q83W | A49G/Q83W/A266V/E294Q/ | + | + |
| | | T307K/D536E | | |
| 281/282 | V134F | A49G/V134F/A266V/T307K/ | + | + |
| | | D536E | | |
| 283/284 | V130S | A49G/V130S/A266V/T307K/ | + | + |
| | | D536E | | |
| 285/286 | A305P | A49G/A266V/A305P/T307K/ | + | + |
| | | D536E | | |
| 287/288 | A319S | A49G/A266V/T307K/A319S/ | + | + |
| | | D536E | | |
| 289/290 | V113T | A49G/V113T/A266V/T307K/ | + | + |
| | | D536E | | |
| 291/292 | K297W | A49G/A266V/K297W/T307K/ | + | + |
| | | D536E | | |
| 293/294 | A319C | A49G/A266V/T307K/A319C/ | + | + |
| | | D536E | | |
| 295/296 | R114G | A49G/R114G/A266V/T307K/ | + | + |
| | | D536E | | |
| 297/298 | T308G | A49G/A266V/T307K/T308G/ | + | + |
| | | D536E | | |
| 299/300 | A309E | A49G/A266V/T307K/A309E/ | + | + |
| | | D536E | | |
| 301/302 | E342W | A49G/A266V/T307K/E342W/ | + | + |
| | | D536E | | |
| 303/304 | K205M | A49G/K205M/A266V/T307K/ | + | + |
| | | D536E | | |
| 305/306 | D212K | A49G/D212K/A266V/T307K/ | + | + |
| | | D536E | | |
| 307/308 | R199L | A49G/R199L/A266V/T307K/ | + | + |
| | | D536E | | |
| 309/310 | Q83C | A49G/Q83C/A266V/T307K/ | + | + |
| | | D536E | | |
| 311/312 | I303G | A49G/A266V/I303G/T307K/ | + | + |
| | | D536E | | |
| 313/314 | A309T | A49G/A266V/T307K/A309T/ | + | + |
| | | D536E | | |
| 315/316 | L78V | A49G/L78V/A266V/T307K/ | + | + |
| | | D536E | | |
| 317/318 | V113G | A49G/V113G/A266V/T307K/ | + | + |
| | | D536E | | |
| 319/320 | K132F | A49G/K132F/A266V/T307K/ | + | + |
| | | D536E | | |
| 321/322 | Q311I | A49G/A266V/T307K/Q311I/ | + | + |
| | | D536E | | |
| 323/324 | N119Y | A49G/N119Y/A266V/T307K/ | + | + |
| | | D536E | | |
| 325/326 | Q83E | A49G/Q83E/A266V/T307K/ | + | + |
| | | D536E | | |
| 327/328 | I98S | A49G/I98S/A266V/T307K/ | + | + |
| | | D536E | | |
| 329/330 | E314M | A49G/A266V/T307K/E314M/ | + | + |
| | | D536E | | |
| 331/332 | E129L | A49G/E129L/A266V/T307K/ | + | + |
| | | D536E | | |
| 333/334 | K343V | A49G/A266V/T307K/K343V/ | + | + |
| | | D536E | | |
| 335/336 | T196H | A49G/T196H/A266V/T307K/ | + | + |
| | | D536E | | |
| 337/338 | R74M | A49G/R74M/A266V/T307K/ | + | + |
| | | D536E | | |
| 339/340 | F356P | A49G/A266V/T307K/F356P/ | + | + |
| | | D536E | | |
| 341/342 | H89A | A49G/H89A/A266V/T307K/ | + | + |
| | | D536E | | |
| 343/344 | D212V | A49G/D212V/A266V/T307K/ | + | + |
| | | D536E | | |
| 345/346 | I444L/H508L/Q509E/ | A49G/A266V/T307K/I444L/ | + | + |
| | E574D | H508L/Q509E/D536E/E574D | | |
| 347/348 | Q63L/S260G/K298R/ | A49G/Q63L/S260G/A266V/ | + | + |
| | V300I/T331E/ | K298R/V300I/T307K/T331E/ | | |
| | I444L/Q509E | I444L/Q509E/D536E | | |
| 349/350 | Q63L/V90I/T209A/ | A49G/Q63L/V90I/T209A/ | + | + |
| | I444L/H508L/ | A266V/T307K/I444L/H508L/ | | |
| | E574Q | D536E/E574Q | | |
| 351/352 | K298R/I444L/Q509E | A49G/A266V/K298R/T307K/ | + | + |
| | | I444L/Q509E/D536E | | |
| 353/354 | Q63L/V90I/H508L/ | A49G/Q63L/V90I/A266V/T307K/ | + | + |
| | Q509E/E574Q/ | H508L/Q509E/D536E/ | | |
| | D595N | E574Q/D595N | | |
| 355/356 | Q83R | A49G/Q83R/A266V/T307K/ | + | + |
| | | D536E | | |
| 357/358 | Q311A | A49G/A266V/T307K/Q311A/ | + | + |
| | | D536E | | |
| 359/360 | H89M | A49G/H89M/A266V/T307K/ | + | + |
| | | D536E | | |
| 361/362 | V130R | A49G/V130R/A266V/T307K/ | + | + |
| | | D536E | | |
| 363/364 | P178L | A49G/P178L/A266V/T307K/ | + | + |
| | | D536E | | |
| 365/366 | T118R | A49G/T118R/A266V/T307K/ | + | + |
| | | D536E | | |

¹ Levels of increased RNA sensitivity were determined relative to the reference polypeptide of SEQ ID NO: 94, and defined as follows: “+” > than 1-fold but less than 1.75-fold increased activity; “++” > than 1.75-fold
² Levels of increased activity were determined relative to the reference polypeptide of SEQ ID NO: 94, and defined as follows: “+” > than 1-fold but less than 1.75-fold increased activity; “++” > than 1.75-fold

### Example 7: Improvements over SEQ ID NO: 352 in Reverse Transcriptase Processivity

[0291] SEQ ID NO: 352 was selected as the parent enzyme for this round of directed evolution. Libraries of engineered genes were produced using well established techniques (e.g., saturation mutagenesis, recombination of previously identified beneficial mutations). The polypeptides encoded by each gene were produced in HTP as described in Example 2, and the soluble lysate was generated as described in Example 3. Each variant was screened in a 20 μL reaction that comprised 0.00078 ng/uL SARS-CoV2.

[0292] RNA fragment containing the transcript of the nucleocapsid gene, 500 nM N1 primers, 125 nM probe (CDC EUA assay, Catalog #2019-nCoVEUA-01), 0.2 mM dNTPs, RT buffer (10 mM Tris-HCl, 50 mM KCl, 1.5 mM MgCl₂), 2.5 vol % RT HTP lysate, 20 ng/uL engineered DNA polymerase (SEQ ID NO: 569) and RT-qPCR performed by incubation at 62.5° C. for 5 min followed by qPCR cycling (95° C. 2 min, 95° C. 3 sec, 55° C. 30 sec for 45 cycles) in a CFX384 Touch Real-Time PCR detection System (BioRad).

[0293] RNA sensitivity relative to SEQ ID NO: 352 (Processivity FIOP) was calculated as the inverse of Ct value (critical threshold) formed by the variant over the inverse of Ct value of SEQ ID NO:352 and shown in Table 7.1.

TABLE 7.1
Processivity of Variants Relative to SEQ ID NO: 352

| | Amino Acid | Amino Acid | Processivity |
|---|---|---|---|
| SEQ ID | Differences | Differences | FIOP ¹ |
| NO: | (Relative to | (Relative to | (Relative to |
| (nt/aa) | SEQ ID NO: 352) | SEQ ID NO: 2) | SEQ ID NO: 352) |
| 367/368 | A309E/E342W | A49G/A266V/K298R/T307K/A309E/E342W/ | + |
| | | I444L/Q509E/D536E | |
| 369/370 | A309T | A49G/A266V/K298R/T307K/A309T/I444L/ | + |
| | | Q509E/D536E | |
| 371/372 | E129L/R298K | A49G/E129L/A266V/T307K/I444L/Q509E/ | + |
| | | D536E | |
| 373/374 | E509Q/E574Q | A49G/A266V/K298R/T307K/I444L/D536E/ | + |
| | | E574Q | |
| 375/376 | G85R | A49G/G85R/A266V/K298R/T307K/I444L/ | + |
| | | Q509E/D536E | |
| 377/378 | I98S/N119Y/E129L/ | A49G/I98S/N119Y/E129L/K132F/T196H/ | + |
| | K132F/T196H/R298K | A266V/T307K/I444L/Q509E/D536E | |
| 379/380 | I98S/R298K/G317C/ | A49G/I98S/A266V/T307K/G317C/K343V/ | + |
| | K343V/F356P | F356P/I444L/Q509E/D536E | |
| 381/382 | K205M/D212K/R298K/ | A49G/K205M/D212K/A266V/T307K/A309E/ | + |
| | A309E/A319S/E342W/E509Q | A319S/E342W/I444L/D536E | |
| 383/384 | L444I | A49G/A266V/K298R/T307K/Q509E/D536E | + |
| 385/386 | L78V/K132F/E314M | A49G/L78V/K132F/A266V/K298R/T307K/ | + |
| | | E314M/I444L/Q509E/D536E | |
| 387/388 | L78V/Q83E/I98S | A49G/L78V/Q83E/I98S/A266V/K298R/T307K/ | + |
| | | I444L/Q509E/D536E | |
| 389/390 | L78V/Q83E/N119Y/ | A49G/L78V/Q83E/N119Y/K132F/T196H/ | + |
| | K132F/T196H/L444I | A266V/K298R/T307K/Q509E/D536E | |
| 391/392 | L78V/Q83E/R298K | A49G/L78V/Q83E/A266V/T307K/I444L/ | + |
| | | Q509E/D536E | |
| 393/394 | L78V/Q83E/R298K/E509Q | A49G/L78V/Q83E/A266V/T307K/I444L/ | + |
| | | D536E | |
| 395/396 | L78V/Q83E/R298K/F356P | A49G/L78V/Q83E/A266V/T307K/F356P/ | + |
| | | I444L/Q509E/D536E | |
| 397/398 | L78V/R298K/L444I | A49G/L78V/A266V/T307K/Q509E/D536E | + |
| 399/400 | N119Y/E129L/K132F | A49G/N119Y/E129L/K132F/A266V/K298R/ | + |
| | | T307K/I444L/Q509E/D536E | |
| 401/402 | P178L/R298K/I303G/ | A49G/P178L/A266V/I303G/T307K/T331E/ | + |
| | T331E/P338V/H508L | P338V/I444L/H508L/Q509E/D536E | |
| 403/404 | Q311I/E314M | A49G/A266V/K298R/T307K/Q311I/E314M/ | + |
| | | I444L/Q509E/D536E | |
| 405/406 | Q63L/K297W/I303G/ | A49G/Q63L/A266V/K297W/K298R/I303G/ | + |
| | A305P/L444I | A305P/T307K/Q509E/D536E | |
| 407/408 | Q63L/P178L/T209A/ | A49G/Q63L/P178L/T209A/S260G/A266V/ | + |
| | S260G/E574Q | K298R/T307K/I444L/Q509E/D536E/E574Q | |
| 409/410 | Q63L/V300I/P338V | A49G/Q63L/A266V/K298R/V300I/T307K/ | + |
| | | P338V/I444L/Q509E/D536E | |
| 411/412 | Q83A/E294Q | A49G/Q83A/A266V/E294Q/K298R/T307K/ | + |
| | | I444L/Q509E/D536E | |
| 413/414 | Q83A/R92T/R298K/ | A49G/Q83A/R92T/A266V/T307K/K343A/ | + |
| | K343A/E574Q | I444L/Q509E/D536E/E574Q | |
| 415/416 | Q83A/R92T/V134P/ | A49G/Q83A/R92T/V134P/A266V/K298R/ | + |
| | L444I/E574Q | T307K/Q509E/D536E/E574Q | |
| 417/418 | Q83A/T196C/F329S/ | A49G/Q83A/T196C/A266V/K298R/T307K/ | + |
| | K343A | F329S/K343A/I444L/Q509E/D536E | |
| 419/420 | Q83A/T196C/R298K/ | A49G/Q83A/T196C/A266V/T307K/I444L/ | + |
| | E509Q | D536E | |
| 421/422 | Q83A/V134F/T196C/ | A49G/Q83A/V134F/T196C/E294Q/A266V/ | + |
| | E294Q/R298K/A305S/ | A305S/T307K/Q311P/A319G/F329S/K343A/ | |
| | Q311P/A319G/ | Q509E/D536E/E574Q | |
| | F329S/K343A/L444I/ | | |
| | E574Q | | |
| 423/424 | Q83C | A49G/Q83C/A266V/K298R/T307K/I444L/ | + |
| | | Q509E/D536E | |
| 425/426 | Q83C/A309T | A49G/Q83C/A266V/K298R/T307K/A309T/ | + |
| | | I444L/Q509E/D536E | |
| 427/428 | Q83C/A319S/E342W/ | A49G/Q83C/A266V/K298R/T307K/A319S/ | + |
| | E509Q | E342W/I444L/D536E | |
| 429/430 | Q83C/K205M/L444I | A49G/Q83C/K205M/A266V/K298R/T307K/ | + |
| | | Q509E/D536E | |
| 431/432 | Q83C/L444I | A49G/Q83C/A266V/K298R/T307K/Q509E/ | + |
| | | D536E | |
| 433/434 | Q83C/R114G | A49G/Q83C/R114G/A266V/K298R/T307K/ | + |
| | | I444L/Q509E/D536E | |
| 435/436 | Q83C/R114G/A309T/ | A49G/Q83C/R114G/A266V/K298R/T307K/ | + |
| | E509Q | A309T/I444L/D536E | |
| 437/438 | Q83C/R114G/R298K/ | A49G/Q83C/R114G/A266V/T307K/A319C/ | + |
| | A319C | I444L/Q509E/D536E | |
| 439/440 | Q83C/R199L/D212K/ | A49G/Q83C/R199L/D212K/A266V/T307K/ | + |
| | R298K/A309E/ | A309E/A319C/Q509E/D536E/P639H | |
| | A319C/L444I/P639H | | |
| 441/442 | Q83C/R199L/E509Q | A49G/Q83C/R199L/A266V/K298R/T307K/ | + |
| | | I444L/D536E | |
| 443/444 | Q83C/R298K | A49G/Q83C/A266V/T307K/I444L/Q509E/ | + |
| | | D536E | |
| 445/446 | Q83C/R298K/E342w | A49G/Q83C/A266V/T307K/E342W/I444L/ | + |
| | | Q509E/D536E | |
| 447/448 | Q83C/T308G/A309E/ | A49G/Q83C/A266V/K298R/T307K/T308G/ | + |
| | D595N/L638H | A309E/I444L/Q509E/D536E/D595N/L638H | |
| 449/450 | Q83C/V113T/R114G/ | A49G/Q83C/V113T/R114G/K205M/D212K/ | + |
| | K205M/D212K | A266V/K298R/T307K/I444L/Q509E/D536E | |
| 451/452 | Q83C/V130S/R298K/ | A49G/Q83C/V130S/A266V/T307K/Q509E/ | + |
| | L444I | D536E | |
| 453/454 | R114G/A309E | A49G/R114G/A266V/K298R/T307K/A309E/ | + |
| | | I444L/Q509E/D536E | |
| 455/456 | R114G/A309E/E509Q | A49G/R114G/A266V/K298R/T307K/A309E/ | + |
| | | I444L/D536E | |
| 457/458 | R114G/D212K/A309E/ | A49G/R114G/D212K/A266V/K298R/T307K/ | + |
| | E342W/P639H | A309E/E342W/I444L/Q509E/D536E/ | |
| | | P639H | |
| 459/460 | R114G/K205M/L444I | A49G/R114G/K205M/A266V/K298R/T307K/ | + |
| | | Q509E/D536E | |
| 461/462 | R114G/R298K | A49G/R114G/A266V/T307K/I444L/Q509E/ | + |
| | | D536E | |
| 463/464 | R114G/V130S/A319S/ | A49G/R114G/V130S/A266V/K298R/T307K/ | + |
| | L444I | A319S/Q509E/D536E | |
| 465/466 | R114G/V130S/D212K/ | A49G/R114G/V130S/D212K/A266V/T307K/ | + |
| | R298K/E342W | E342W/I444L/Q509E/D536E | |
| 467/468 | R114G/V130S/R298K/ | A49G/R114G/V130S/A266V/T307K/A309E/ | + |
| | A309E | I444L/Q509E/D536E | |
| 469/470 | R199L/A309T | A49G/R199L/A266V/K298R/T307K/A309T/ | + |
| | | I444L/Q509E/D536E | |
| 471/472 | R199L/K205M/ | A49G/R199L/K205M/A266V/K298R/T307K/ | + |
| | L444I | Q509E/D536E | |
| 473/474 | R298K | A49G/A266V/T307K/I444L/Q509E/D536E | + |
| 475/476 | R298K/E342W | A49G/A266V/T307K/E342W/I444L/Q509E/ | + |
| | | D536E | |
| 477/478 | R298K/E509Q | A49G/A266V/T307K/I444L/D536E | + |
| 479/480 | R298K/K343A/L444I/ | A49G/A266V/T307K/K343A/Q509E/D536E/ | + |
| | D595N | D595N | |
| 481/482 | R74M | A49G/R74M/A266V/K298R/T307K/I444L/ | + |
| | | Q509E/D536E | |
| 483/484 | R74M/E129L/R298K/ | A49G/R74M/E129L/A266V/T307K/Q509E/ | + |
| | L444I | D536E | |
| 485/486 | R74M/Q83E/E129L/ | A49G/R74M/Q83E/E129L/K132F/D212V/ | + |
| | K132F/D212V/ | A266V/K298R/T307K/I444L/D536E | |
| | E509Q | | |
| 487/488 | R74P/Q83A/R92T/ | A49G/R74P/Q83A/R92T/A266WT307K/ | + |
| | R298K/K343A/ | K343A/I444L/D536E | |
| | E509Q | | |
| 489/490 | R74P/Q83A/V134P/ | A49G/R74P/Q83A/V134P/A266V/E294Q/ | + |
| | E294Q/R298K/ | T307K/I444L/Q509E/D536E/E574Q | |
| | E574Q | | |
| 491/492 | R74P/Q83W/L444I/ | A49G/R74P/Q83W/A266V/K298R/T307K/ | + |
| | E509Q | D536E | |
| 493/494 | R74P/R298K/F329S/ | A49G/R74P/A266V/T307K/F329S/Q509E/ | + |
| | L444I/E574Q | D536E/E574Q | |
| 495/496 | R74P/R92T/T196C/ | A49G/R74P/R92T/T196C/A266V/E294Q/ | + |
| | E294Q/F329S | K298R/T307K/F329S/I444L/Q509E/ | |
| | | D536E | |
| 497/498 | R92T/R298K/E509Q | A49G/R92T/A266V/T307K/I444L/D536E | + |
| 499/500 | S72M | A49G/S72M/A266V/K298R/T307K/I444L/ | + |
| | | Q509E/D536E | |
| 501/502 | S72M/E294Q/Q311A/ | A49G/S72M/A266V/E294Q/K298R/T307K/ | + |
| | F329S/K343A/ | Q311A/F329S/K343A/Q509E/D536E | |
| | L444I | | |
| 503/504 | S72M/E294Q/R298K/ | A49G/S72M/A266V/E294Q/T307K/Q509E/ | + |
| | L444I | D536E | |
| 505/506 | S72M/E294Q/R298K/ | A49G/S72M/A266V/E294Q/T307K/Q311A/ | + |
| | Q311A/F329S/ | F329S/Q509E/D536E | |
| | L444I | | |
| 507/508 | S72M/E509Q | A49G/S72M/A266V/K298R/T307K/I444L/ | + |
| | | D536E | |
| 509/510 | S72M/Q83A/R298K/ | A49G/S72M/Q83A/A266V7T307K/K343A/ | + |
| | K343A/L444I | Q509E/D536E | |
| 511/512 | S72M/R74P/E294Q/ | A49G/A266V/S72M/R74P/E294Q/T307K/ | + |
| | R298K/L444I | Q509E/D536E | |
| 513/514 | S72M/R74P/Q83A/ | A49G/S72M/R74P/Q83A/A266V/K298R/ | + |
| | A319G/F329S/ | T307K/A319G/F329S/I444L/D536E | |
| | E509Q | | |
| 515/516 | S72M/R74P/Q83A/ | A49G/S72M/R74P/Q83A/E84N/A266V/ | + |
| | E84N/L444I | K298R/T307K/Q509E/D536E | |
| 517/518 | S72M/R74P/Q83A/ | A49G/S72M/R74P/Q83A/V134F/T196C/ | + |
| | V134F/T196C/E294Q/ | A266V/E294Q/T307K/I444L/Q509E/D536E | |
| | R298K | | |
| 519/520 | S72M/R74P/R298K/ | A49G/S72M/R74P/A266V/T307K/I444L/ | + |
| | E509Q | D536E | |
| 521/522 | S72M/R74P/R92T/ | A49G/S72M/R74P/R92T/A266V/E294Q/ | + |
| | E294Q/R298K/F329S | T307K/F329S/I444L/Q509E/D536E | |
| 523/524 | S72M/R74P/R92T/ | A49G/S72M/R74P/R92T/A266V/T307K/ | + |
| | R298K | I444L/Q509E/D536E | |
| 525/526 | S72M/R74P/R92T/ | A49G/S72M/R74P/R92T/V134P/A266V/ | + |
| | V134P/R298K/K343A/ | T307K/K343A/Q509E/D536E | |
| | L444I | | |
| 527/528 | S72M/R74P/V134F/ | A49G/S72M/R74P/V134F/T196C/A266V/ | + |
| | T196C/R298K/A319G/ | T307K/A319G/F329S/I444L/D536E | |
| | F329S/E509Q | | |
| 529/530 | S72M/T196C/Q311A/ | A49G/S72M/T196C/A266V/K298R/T307K/ | + |
| | F329S/E574Q | Q311A/F329S/I444L/Q509E/D536E/E574Q | |
| 531/532 | S72M/V134P/T196C/ | A49G/S72M/V134P/T196C/A266V/T307K/ | + |
| | R298K | I444I/Q509E/D536E | |
| 533/534 | T118R/P178L/P338V/ | A49G/T118R/P178L/A266V/K298R/T307K/ | + |
| | L444I | P338V/I444L/Q509E/D536E | |
| 535/536 | T69R/H89A/P178L/ | A49G/T69R/H89A/P178L/A266V/K298R/ | + |
| | I303G/A305P/P338V/ | I303G/A305P/T307K/P338V/I444L/Q509E/ | |
| | L444I/E574Q | D536E/E574Q | |
| 537/538 | V113G | A49G/V113G/A266V/K298R/T307K/I444L/ | + |
| | | Q509E/D536E | |
| 539/540 | V113G/P178L/ | A49G/V113G/P178L/S260G/A266V/K298R/ | + |
| | S260G | T307K/I444L/Q509E/D536E | |
| 541/542 | V113T/A309E | A49G/V113T/A266V/K298R/T307K/A309E/ | + |
| | | I444L/Q509E/D536E | |
| 543/544 | V113T/D212K/A309E | A49G/V113T/D212K/A266V/K298R/T307K/ | + |
| | | A309E/I444L/Q509E/D536E | |
| 545/546 | V113T/E342W | A49G/V113T/A266V/K298R/T307K/E342W/ | + |
| | | I444L/Q509E/D536E | |
| 547/548 | V113T/R114G | A49G/V113T/R114G/A266V/K298R/T307K/ | + |
| | | I444L/Q509E/D536E | |
| 549/550 | V113T/R114G/ | A49G/V113T/R114G/D212K/A266V/K298R/ | + |
| | D212K | T307K/I444L/Q509E/D536E | |
| 551/552 | V113T/R114G/K205M/ | A49G/V113T/R114G/K205M/A266V/K298R/ | + |
| | A319C/E342W | T307K/A319C/E342W/I444L/Q509E/D536E | |
| 553/554 | V113T/R114G/R298K/ | A49G/V113T/R114G/A266WT307K/E342W/ | + |
| | E342W | I444L/Q509E/D536E | |
| 555/556 | V113T/R114G/V130S | A49G/V113T/R114G/V130S/A266V/K298R/ | + |
| | | T307K/I444L/Q509E/D536E | |
| 557/558 | V113T/R298K | A49G/V113T/A266V/T307K/I444L/Q509E/ | + |
| | | D536E | |
| 559/560 | V113T/R298K/A309E/ | A49G/V113T/A266V/K298R/T307K/A309E/ | + |
| | L444I | Q509E/D536E | |
| 561/562 | V130S/K205M/A333V/ | A49G/V130S/K205M/A266V/K298R/T307K/ | + |
| | L444I | A333V/Q509E/D536E | |
| 563/564 | V134P | A49G/V134P/A266V/K298R/T307K/I444L/ | + |
| | | Q509E/D536E | |
| 565/566 | V134P/E294Q/L444I/ | A49G/V134P/A266V/E294Q/K298R/T307K/ | + |
| | E509Q | D536E | |

¹ Levels of increased activity were determined relative to the reference polypeptide of SEQ ID NO: 352 and defined as follows: “+” > than 1-fold but less than 2.0-fold increased activity; “++” > than 2.0-fold but less than 4-fold increased activity; “+++” > than 4-fold increased activity

[0294] While the invention has been described with reference to the specific embodiments, various changes can be made and equivalents can be substituted to adapt to a particular situation, material, composition of matter, process, process step or steps, thereby achieving benefits of the invention without departing from the scope of what is claimed.

[0295] For all purposes, each and every publication and patent document cited in this disclosure is incorporated herein by reference as if each such publication or document was specifically and individually indicated to be incorporated herein by reference. Citation of publications and patent documents is not intended as an indication that any such document is pertinent prior art, nor does it constitute an admission as to its contents or date.

1. A recombinant reverse transcriptase, or a functional fragment thereof, comprising a polypeptide sequence having at least 75%, 80%, 81%, 82%, 83%, 84%, 85%, 86%, 87%, 88%, 89%, 90%, 91%, 92%, 93%, 94%, 95%, 96%, 97%, 98%, 99%, or more sequence identity to a reference sequence corresponding to residues 12 to 687 of SEQ ID NO: 2, 24, 94, or 352, or to a reference sequence corresponding to SEQ ID NO: 2, 24, 94, or 352, wherein the polypeptide sequence comprises one or more substitutions relative to the reference sequence corresponding to residues 12 to 687 of SEQ ID NO: 2, 24, 94, or 352, or to the reference sequence corresponding to SEQ ID NO: 2, 24, 94, or 352.

2. The recombinant reverse transcriptase of claim 1, comprising a polypeptide sequence having at least 75%, 80%, 81%, 82%, 83%, 84%, 85%, 86%, 87%, 88%, 89%, 90%, 91%, 92%, 93%, 94%, 95%, 96%, 97%, 98%, 99%, or more sequence identity to the reference sequence corresponding to residues 12 to 687 of SEQ ID NO: 2, or to the reference sequence corresponding to SEQ ID NO: 2, wherein the polypeptide sequence comprises one or more substitutions relative to the reference sequence corresponding to residues 12 to 687 of SEQ ID NO: 2, or to the reference sequence corresponding to SEQ ID NO: 2.

3. The recombinant reverse transcriptase of claim 1, comprising a polypeptide sequence having at least 75%, 80%, 81%, 82%, 83%, 84%, 85%, 86%, 87%, 88%, 89%, 90%, 91%, 92%, 93%, 94%, 95%, 96%, 97%, 98%, 99%, or more sequence identity to the reference sequence corresponding to residues 12 to 687 of SEQ ID NO: 24, 94, or 352, or to the reference sequence corresponding to SEQ ID NO: 24, 94, or 352, wherein the polypeptide sequence comprises one or more substitutions relative to the reference sequence corresponding to residues 12 to 687 of SEQ ID NO: 2, or to the reference sequence corresponding to SEQ ID NO: 2.

4. The recombinant reverse transcriptase of claim 2, wherein the polypeptide sequence comprises at least a substitution at amino acid position 18, 25, 49, 63, 68, 69, 72, 74, 78, 81, 83, 84, 85, 89, 90, 92, 94, 98, 102, 113, 114, 118, 119, 129, 130, 132, 134, 163, 167, 171, 173, 178, 196, 199, 205, 209, 210, 212, 216, 242, 258, 260, 261, 266, 294, 297, 298, 300, 303, 305, 307, 308, 309, 310, 311, 314, 317, 319, 321, 329, 331, 333, 338, 342, 343, 349, 356, 370, 403, 444, 447, 454, 464, 465, 466, 474, 479, 508, 509, 519, 536, 537, 554, 574, 576, 583, 595, 598, 606, 638, 639, or 662, or combinations thereof, wherein the amino acid positions are relative to the reference sequence of SEQ ID NO: 2.

5. The recombinant reverse transcriptase of claim 2, wherein the polypeptide sequence comprises at least a substitution 18E, 25E, 49G, 63L/P, 68S, 69R, 72M, 74K/M/P, 78V, 81K, 83E/A/C/R/W, 84N, 85R, 89A/M, 90I, 92T, 94L, 98S, 102C, 113G/T, 114G/K, 118R, 119Y, 129L, 130R/S, 132F, 134F/P, 163P, 167Y, 171L, 173A, 178L, 196C/H, 199L, 205M, 209A, 210L, 212K/N/V, 216R, 242A, 258T, 260G, 261N, 266V, 294Q, 297W, 298E/R, 300I, 303G/Q, 305P/S, 307K/N, 308G, 309E/P/T, 310R, 311A/I/P, 314A/K/M, 317C, 319C/G/S, 321A, 329S, 331E, 333V, 338V, 342W, 343A/V, 349G, 356P, 370G, 403H, 444L, 447G/L/R, 454A, 464L, 465S, 466K, 474A, 479D, 508L, 509E, 519P, 536E/A/N, 537W, 554T, 574D/Q, 576I, 583K, 595N, 598S, 606K/Q, 638H, 639H, or 662R, or combinations thereof, wherein the amino acid positions are relative to the reference sequence of SEQ ID NO:2.

6. The recombinant reverse transcriptase of claim 2, wherein the polypeptide sequence comprises at least a substitution at amino acid position 49, 266, 298, 307, 444, 509, or 536, or combinations thereof, wherein the amino acid positions are relative to the reference sequence of SEQ ID NO:2.

7. The recombinant reverse transcriptase of claim 6, wherein the polypeptide sequence comprises at least a substitution 49G, 266V, 298E/R, 307K/N, 444L, 509E, or 536E/A/N, or combinations thereof, wherein the amino acid positions are relative to the reference sequence of SEQ ID NO: 2.

8-18. (canceled)

19. The recombinant reverse transcriptase of claim 1, comprising a polypeptide sequence having at least 75%, 80%, 81%, 82%, 83%, 84%, 85%, 86%, 87%, 88%, 89%, 90%, 91%, 92%, 93%, 94%, 95%, 96%, 97%, 98%, 99%, or more sequence identity to a reference sequence corresponding to residues 12 to 687 of SEQ ID NO: 24, 94, or 352, or to a reference sequence corresponding to SEQ ID NO: 24, 94, or 352.

20. The recombinant reverse transcriptase of claim 1, comprising a polypeptide sequence having at least 75%, 80%, 81%, 82%, 83%, 84%, 85%, 86%, 87%, 88%, 89%, 90%, 91%, 92%, 93%, 94%, 95%, 96%, 97%, 98%, 99%, or more sequence identity to a reference sequence corresponding to residues 12 to 687 of SEQ ID NO: 24, 94, or 352, or to a reference sequence corresponding to SEQ ID NO: SEQ ID NO: 24, 94, or 352, wherein the polypeptide sequence comprises one or more substitutions relative to the reference sequence corresponding to residues 12 to 687 of SEQ ID NO: 24, 94, or 352, or to the reference sequence corresponding to SEQ ID NO: 24, 94, or 352.

21. The recombinant reverse transcriptase of claim 20, wherein the polypeptide sequence comprises at least a substitution at amino acid position 18, 25, 49, 63, 68, 69, 72, 74, 78, 81, 83, 89, 90, 92, 94, 98, 102, 113, 114, 118, 119, 129, 130, 132, 134, 163, 167, 171, 173, 178, 196, 199, 205, 209, 210, 212, 216, 242, 258, 260, 261, 266, 294, 297, 298, 300, 303, 305, 307, 308, 309, 310, 311, 314, 319, 321, 329, 331, 338, 342, 343, 349, 356, 370, 403, 423, 444, 447, 454, 464, 465, 466, 474, 479, 508, 509, 519, 536, 537, 554, 574, 576, 583, 595, 598, 606, 650, 662, or 665, or combinations thereof, wherein the amino acid positions are relative to the reference sequence of SEQ ID NO: 24, 94, or 352.

22. The recombinant reverse transcriptase of claim 20 or 21, wherein the polypeptide sequence comprises at least an amino acid residue 18E, 25E, 49G, 63L/P, 68S, 69R, 72M, 74K/M/P, 78V, 81K, 83E/A/C/R/W, 89A/M, 90I, 92T, 94L, 98S, 102C, 113G/T, 114G/K, 118R, 119Y, 129L, 130R/S, 132F, 134F/P, 163P, 167Y, 171L, 173A, 178L, 196C/H, 199L, 205M, 209A, 210L, 212K/N/V, 216R, 242A, 258T, 260G, 261N, 266V, 294Q, 297W, 298E/R, 3001, 303G/Q, 305P, 307K/N, 308G, 309E/P/T, 310R, 311A/I/P, 314A/K/M, 319C/G/S, 321A, 329S, 331E, 338V, 342W, 343A/V, 349G, 356P, 370G, 403H, 444L, 447G/L/R, 454A, 464L, 465S, 466K, 474A, 479D, 508L, 509E, 519P, 536E/A/N, 537W, 554T, 574D/Q, 576I, 583K, 595N, 598S, 606K/Q, or 662R, or combinations thereof, wherein the amino acid positions are relative to the reference sequence of SEQ ID NO: 24, 94, or 352.

23. The recombinant reverse transcriptase of claim 20, wherein the polypeptide sequence comprises at least a substitution at amino acid position 49, 266, 298, 307, 444, 509, or 536, or combinations thereof.

24. The recombinant reverse transcriptase of claim 20, wherein the polypeptide sequence comprises at least an amino acid residue 49G, 266V, 298E/R, 307K/N, 444L, 509E, or 536E/A/N, or combinations thereof.

25-36. (canceled)

37. The recombinant reverse transcriptase of claim 1, wherein the reverse transcriptase comprises a polypeptide sequence comprising residues 12 to 687 of SEQ ID NO: 4, 6, 8, 10, 12, 14, 16, 18, 20, 22, 24, 26, 28, 30, 32, 34, 36, 38, 40, 42, 44, 46, 48, 50, 52, 54, 56, 58, 60, 62, 64, 66, 68, 70, 72, 74, 76, 78, 80, 82, 84, 86, 88, 90, 92, 94, 96, 98, 100, 102, 104, 106, 108, 110, 112, 114, 116, 118, 120, 122, 124, 126, 128, 130, 132, 134, 136, 138, 140, 142, 144, 146, 148, 150, 152, 154, 156, 158, 160, 162, 164, 166, 168, 170, 172, 174, 176, 178, 180, 182, 184, 186, 188, 190, 192, 194, 196, 198, 200, 202, 204, 206, 208, 210, 212, 214, 216, 218, 220, 222, 224, 226, 228, 230, 232, 234, 236, 238, 240, 242, 244, 246, 248, 250, 252, 254, 256, 258, 260, 262, 264, 266, 268, 270, 272, 274, 276, 278, 280, 282, 284, 286, 288, 290, 292, 294, 296, 298, 300, 302, 304, 306, 308, 310, 312, 314, 316, 318, 320, 322, 324, 326, 328, 330, 332, 334, 336, 338, 340, 342, 344, 346, 348, 350, 352, 354, 356, 358, 360, 362, 364, 366, 368, 370, 372, 374, 376, 378, 380, 382, 384, 386, 388, 390, 392, 394, 396, 398, 400, 402, 404, 406, 408, 410, 412, 414, 416, 418, 420, 422, 424, 426, 428, 430, 432, 434, 436, 438, 440, 442, 444, 446, 448, 450, 452, 454, 456. 458, 460. 462, 464, 466, 468, 470, 472, 474, 476, 478, 480, 482, 484, 486, 488, 490, 492, 494, 496, 498, 500, 502, 504, 506, 508, 510, 512, 514, 516, 518, 520, 522, 524, 526, 528, 530, 532, 534, 536, 538, 540, 542, 544, 546, 548, 550, 552, 554, 556, 558, 560, 562, 564, or 566, wherein the polypeptide sequence optionally has 1, 2, 3, 4, 5, 6, 7, 8, 9, or up to 10 substitutions.

38. The recombinant reverse transcriptase of claim 1, wherein the reverse transcriptase comprises a polypeptide sequence comprising SEQ ID NO: 4, 6, 8, 10, 12, 14, 16, 18, 20, 22, 24, 26, 28, 30, 32, 34, 36, 38, 40, 42, 44, 46, 48, 50, 52, 54, 56, 58, 60, 62, 64, 66, 68, 70, 72, 74, 76, 78, 80, 82, 84, 86, 88, 90, 92, 94, 96, 98, 100, 102, 104, 106, 108, 110, 112, 114, 116, 118, 120, 122, 124, 126, 128, 130, 132, 134, 136, 138, 140, 142, 144, 146, 148, 150, 152, 154, 156, 158, 160, 162, 164, 166, 168, 170, 172, 174, 176, 178, 180, 182, 184, 186, 188, 190, 192, 194, 196, 198, 200, 202, 204, 206, 208, 210, 212, 214, 216, 218, 220, 222, 224, 226, 228, 230, 232, 234, 236, 238, 240, 242, 244, 246, 248, 250, 252, 254, 256, 258, 260, 262, 264, 266, 268, 270, 272, 274, 276, 278, 280, 282, 284, 286, 288, 290, 292, 294, 296, 298, 300, 302, 304, 306, 308, 310, 312, 314, 316, 318, 320, 322, 324, 326, 328, 330, 332, 334, 336, 338, 340, 342, 344, 346, 348, 350, 352, 354, 356, 358, 360, 362, 364, 366, 368, 370, 372, 374, 376, 378, 380, 382, 384, 386, 388, 390, 392, 394, 396, 398, 400, 402, 404, 406, 408, 410, 412, 414, 416, 418, 420, 422, 424, 426, 428, 430, 432, 434, 436, 438, 440, 442, 444, 446, 448, 450, 452, 454, 456. 458, 460. 462, 464, 466, 468, 470, 472, 474, 476, 478, 480, 482, 484, 486, 488, 490, 492, 494, 496, 498, 500, 502, 504, 506, 508, 510, 512, 514, 516, 518, 520, 522, 524, 526, 528, 530, 532, 534, 536, 538, 540, 542, 544, 546, 548, 550, 552, 554, 556, 558, 560, 562, 564, or 566, wherein the polypeptide sequence optionally has 1, 2, 3, 4, 5, 6, 7, 8, 9, or up to 10 substitutions. 39-44. (Canceled)

45. A recombinant polynucleotide encoding a recombinant reverse transcriptase of claim 1.

46. The recombinant polynucleotide of claim 45, comprising a sequence having at least 75%, 80%, 81%, 82%, 83%, 84%, 85%, 90%, 91%, 92%, 93%, 94%, 95%, 96%, 97%, 98%, 99%, or more sequence identity to a reference polynucleotide sequence corresponding to residues 34 to 2061 of SEQ ID NO: 1, 23, 93, or 351, or to a reference polynucleotide sequence corresponding to SEQ ID NO: 1, 23, 93, or 351, wherein the recombinant polynucleotide encodes a recombinant reverse transcriptase.

47. (canceled)

48. (canceled)

49. The recombinant polynucleotide of claim 45, wherein the polynucleotide sequence comprises nucleotide residues 34 to 2061 of SEQ ID NO: 3, 5, 7, 9, 11, 13, 15, 17, 19, 21, 23, 25, 27, 29, 31, 33, 35, 37. 39, 41, 43, 45, 47, 49, 51, 53, 55, 57, 59, 61, 63, 65, 67, 69, 71, 73, 75, 77, 79, 81, 83, 85, 87, 89, 91, 93, 95, 97, 99, 101, 103, 105, 107, 109, 111, 113, 115, 117, 119, 121, 123, 125, 127, 129, 131, 133, 135, 137, 139, 141, 143, 145, 147, 149, 151, 153, 155, 157, 159, 161, 163, 165, 167, 169, 171, 173, 175, 177, 179, 181, 183, 185, 187, 189, 191, 193, 195, 197, 199, 201, 203, 205, 207, 209, 211, 213, 215, 217, 219, 221, 223, 225, 227, 229, 231, 233, 235, 237, 239, 241, 243, 245, 247, 249, 251, 253, 255, 257, 259, 261, 263, 265, 267, 269, 271, 273, 275, 277, 279, 281, 283, 285, 287, 289, 291, 293, 295, 297, 299, 301, 303, 305, 307, 309, 311, 313, 315, 317, 319, 321, 323, 325, 327, 329, 331, 333, 335, 337, 339, 341, 343, 345, 347, 349, 351, 353, 355, 357, 359, 361, 363, 365, 367, 369, 371, 373, 375, 377, 379, 381, 383, 385, 387, 389, 391, 393, 395, 397, 399, 401, 403, 405, 407, 409, 411, 413, 415, 417, 419, 421, 423, 425, 427, 429, 431, 433, 435, 437, 439, 441, 443, 445, 447, 449, 451, 453, 455, 457. 459, 461. 463, 465, 467, 469, 471, 473, 475, 477, 479, 481, 483, 485, 487, 489, 491, 493, 495, 497, 499, 501, 503, 505, 507, 509, 511, 513, 515, 517, 519, 521, 523, 525, 527, 529, 531, 533, 535, 537, 539, 541, 543, 545, 547, 549, 551, 553, 555, 557, 559, 561, 563, or 565.

50. The recombinant polynucleotide of claim 45, wherein the polynucleotide sequence comprises SEQ ID NO: 3, 5, 7, 9, 11, 13, 15, 17, 19, 21, 23, 25, 27, 29, 31, 33, 35, 37. 39, 41, 43, 45, 47, 49, 51, 53, 55, 57, 59, 61, 63, 65, 67, 69, 71, 73, 75, 77, 79, 81, 83, 85, 87, 89, 91, 93, 95, 97, 99, 101, 103, 105, 107, 109, 111, 113, 115, 117, 119, 121, 123, 125, 127, 129, 131, 133, 135, 137, 139, 141, 143, 145, 147, 149, 151, 153, 155, 157, 159, 161, 163, 165, 167, 169, 171, 173, 175, 177, 179, 181, 183, 185, 187, 189, 191, 193, 195, 197, 199, 201, 203, 205, 207, 209, 211, 213, 215, 217, 219, 221, 223, 225, 227, 229, 231, 233, 235, 237, 239, 241, 243, 245, 247, 249, 251, 253, 255, 257, 259, 261, 263, 265, 267, 269, 271, 273, 275, 277, 279, 281, 283, 285, 287, 289, 291, 293, 295, 297, 299, 301, 303, 305, 307, 309, 311, 313, 315, 317, 319, 321, 323, 325, 327, 329, 331, 333, 335, 337, 339, 341, 343, 345, 347, 349, 351, 353, 355, 357, 359, 361, 363, 365, 367, 369, 371, 373, 375, 377, 379, 381, 383, 385, 387, 389, 391, 393, 395, 397, 399, 401, 403, 405, 407, 409, 411, 413, 415, 417, 419, 421, 423, 425, 427, 429, 431, 433, 435, 437, 439, 441, 443, 445, 447, 449, 451, 453, 455, 457. 459, 461. 463, 465, 467, 469, 471, 473, 475, 477, 479, 481, 483, 485, 487, 489, 491, 493, 495, 497, 499, 501, 503, 505, 507, 509, 511, 513, 515, 517, 519, 521, 523, 525, 527, 529, 531, 533, 535, 537, 539, 541, 543, 545, 547, 549, 551, 553, 555, 557, 559, 561, 563, or 565.

51. An expression vector comprising at least one recombinant polynucleotide of claim 1.

52. (canceled)

53. (canceled)

54. A host cell transformed with a polynucleotide of any one of claims 45-50 or an expression vector of claim 51.

55. (canceled)

56. A method of producing a recombinant reverse transcriptase polypeptide in a host cell comprising culturing a host cell of claim 54, under suitable culture conditions such that at least one recombinant reverse transcriptase is produced.

57. (canceled)

58. (canceled)

59. A composition comprising at least one recombinant reverse transcriptase of claim 1.

60. (canceled)

61. (canceled)

62. A method of preparing a complementary DNA of a target RNA, comprising contacting a target RNA with a recombinant reverse transcriptase of claim 1 in presence of substrates under conditions suitable for production of a complementary DNA to all or a portion of the target RNA.

63. (canceled)

64. A method for detecting presence of a target RNA, comprising contacting a sample suspected of containing a target RNA with a recombinant reverse transcriptase of claim 1 in presence of substrates under conditions suitable for reverse transcriptase mediated production of a DNA complementary to all or a portion of the target RNA, and detecting presence of the complementary DNA.

65-68. (canceled)

69. A kit comprising at least one recombinant reverse transcriptase of claim 1.

70-72. (canceled)

The application's sequence listing, which the Patent Office published only in electronic form, follows.

SEQUENCE LISTING (569 sequences)

SEQ ID NO: 1 - DNA, 2064 bp, synthetic construct
  misc_feature 1..2064: note = Engineered reverse transcriptase variants
  source 1..2064: mol_type = other DNA
atgcatcaccatcaccatcatggtggtagcggagtgctgacccttcagctggatgatgaatatcgcttgtacagtccgctggtcaaaccagaccaaaacattcagttctggctcgaacagtttccgcaagcgtgggctgaaactgcaggcatgggcctggccaaacaggttcctcctcaggtaatccaattaaaggcatctgccacgccggtgtcagttcgtcagtatccgctgtcgaaagaagcgcaagaggggattcgcccacacgtgcagcgtttgatccagcagggcattctggtaccggttcaaagcccctggaataccccgcttttaccagtccgcaaaccgggtacaaacgattaccgtcctgtgcaagacctgcgcgaagtcaataaacgtgtgcaggatatccacccaaccgttccgaacccgtataatctgttgtgcgcgttaccgccgcagcgttcctggtacacggtgctggacctgaaggacgcgttcttctgtcttcgcctccaccccaccagccagccactgtttgcctttgaatggcgcgatcctgatacgggccgtactgggcaattaacatggacccgtttgccgcagggctttaagaacagtcccaccatttttgatgaggctcttcaccgcgacctcgcaaatttccgcatccaacacccacaggtaacgttactccagtatgtcgatgatcttttgttagcgggtgccaccaaacaggactgcttggaaggaacgaaagcacttctcttggaactctcggatttaggttatcgtgcgtccgccaagaaagctcagatttgtcgccgcgaagtgacatacttaggctattcattgcgtgatggtcaacgttggcttactgaggcgcgcaagaagaccgttgttcaaatccccgcccctaccaccgcgaaacagatgcgtgaatttcttggcacggcaggtttctgccgtttgtggattcctggctttgctaccttagcggcacccctctatccactcacgaaagagaaaggagaattctcttgggccccagaacatcagaaagcgtttgacgccatcaagaaagcgttattaagcgctcctgctcttgcattgcccgatgtcaccaaaccattcacgctctacgtggatgaacgcaaaggcgtagcccgcggtgtgttgacacagaccttaggaccttggcgtcgtcccgtggcctacctctcgaagaaacttgacccagttgcaagtggttggcctgtctgcttgaaagctattgccgcagttgcaatcctcgtcaaagatgccgacaaacttactttgggccagaacattactgttattgcaccacacgcccttgaaaacatcgttcgtcagccacctgatcgctggatgaccaatgctcgcatgacgcattatcagagcctcttgcttaccgaacgcgtgacttttgctccacctgcagccttaaaccccgcaacccttttacccgaagaaacagatgagcctgtgacgcatgactgtcaccagctcttgattgaagaaactggcgtacgcaaagacctcaccgatattccattaacaggtgaggtacttacgtggtttaccgatgggtcctcttatgtcgtcgaaggcaaacgtatggctggtgccgccgttgttgatggcacccgtactatctgggcaagcagcttacccgaaggcacgagtgctcagaaagcagagttgatggccttgacccaagccttacgccttgctgaagggaaatcgatcaatatttacaccgactcacgctatgcattcgccacggcacatgtacacggtgccatctacaaacaacgtggtttgttaacttctgctggccgcgagattaagaacaaagaagaaatcctttccttacttgaagccttacacctccccaaacgtctcgctattattcattgtccagggcatcagaaagcaaaagatcctatcagccgtgggaatcaaatggcagatcgtgtcgctaaacaggcagcccaaggcgttaacttgttgcccatgattgagacccctaaagctccatga

SEQ ID NO: 2 - protein, 687 aa, synthetic construct
  REGION 1..687: note = Engineered reverse transcriptase variants
MHHHHHHGGSGVLTLQLDDEYRLYSPLVKPDQNIQFWLEQFPQAWAETAGMGLAKQVPPQVIQLKASATPVSVRQYPLSKEAQEGIRPHVQRLIQQGILVPVQSPWNTPLLPVRKPGTNDYRPVQDLREVNKRVQDIHPTVPNPYNLLCALPPQRSWYTVLDLKDAFFCLRLHPTSQPLFAFEWRDPDTGRTGQLTWTRLPQGFKNSPTIFDEALHRDLANFRIQHPQVTLLQYVDDLLLAGATKQDCLEGTKALLLELSDLGYRASAKKAQICRREVTYLGYSLRDGQRWLTEARKKTVVQIPAPTTAKQMREFLGTAGFCRLWIPGFATLAAPLYPLTKEKGEFSWAPEHQKAFDAIKKALLSAPALALPDVTKPFTLYVDERKGVARGVLTQTLGPWRRPVAYLSKKLDPVASGWPVCLKAIAAVAILVKDADKLTLGQNITVIAPHALENIVRQPPDRWMTNARMTHYQSLLLTERVTFAPPAALNPATLLPEETDEPVTHDCHQLLIEETGVRKDLTDIPLTGEVLTWFTDGSSYVVEGKRMAGAAVVDGTRTIWASSLPEGTSAQKAELMALTQALRLAEGKSINIYTDSRYAFATAHVHGAIYKQRGLLTSAGREIKNKEEILSLLEALHLPKRLAIIHCPGHQKAKDPISRGNQMADRVAKQAAQGVNLLPMIETPKAP

SEQ ID NO: 3 - DNA, 2061 bp, synthetic construct
  misc_feature 1..2061: note = Engineered reverse transcriptase variants
  source 1..2061: mol_type = other DNA
atgcatcaccatcaccatcatggtggtagcggagtgctgacccttcagctggatgatgaatatcgcttgtacagtccgctggtcaaaccagaccaaaacattcagttctggctcgaacagtttccgcaagcgtgggctgaaactgcaggcatgggcctggccaaacaggttcctcctcaggtaatccaattaaaggcatctgccacgccggtgtcagttcgtcagtatccgctgtcgaaagaagcgcaagaggggattcgcccacacgtccagcgtttgatccaacagggcattctggtaccggttcaaagcccctggaataccccgcttttaccagtcaagaaaccgggtacaaacgattaccgtcctgtgcaagacctgcgcgaagtcaataaacgtgtgcaggatatccacccaaccgttccgaacccgtataatctgttgtgcgcgttaccgccgcagcgttcctggtacacggtgctggacctgaaggacgcgttcttctgtcttcgcctccaccccaccagccagccactgtttgcctttgaatggcgcgatcctgatacgggccgtactgggcaattaacatggacccgtttgccgcagggctttaagaacagtcccaccctgtttgatgaggctcttcaccgcgacctcgcaaatttccgcatccaacacccacaggtaacgttactccagtatgtcgatgatcttttgttagcgggtgccaccaaacaggactgcttggaaggaacgaaagcacttctcttggaactctcggatttaggttatcgtgcgtccgccaagaaagctcagatttgtcgccgcgaagtgacatacttaggctattcattgcgtgatggtcaacgttggcttactgaggcgcgcaagaagaccgttgttcaaatccccgcccctaagaccgctaaacagatgcgtgaatttcttggcacggcaggtttctgccgtttgtggattcctggctttgctactttagcggcacccctctatccactcacgaaagagaaaggagaattctcttgggccccagaacatcagaaagcgtttgacgccatcaagaaagcgttattaagcgctcctgctcttgcattgcccgatgtcaccaaaccattcacgctctacgtggatgaacgcaaaggcgtagcccgcggtgtgttgacacagaccttaggaccttggcgtcgtcccgtggcctacctctcgaagaaacttgacccagttgcaagtggttggcctgtctgcttgaaagctattgccgcagttgcaatcctcgtcaaagatgccgacaaacttactttgggccagaacattactgttattgcaccacacgcccttgaaaacatcgttcgtcagccacctgatcgctggatgaccaatgctcgcatgacgcattatcagagcctcttgcttaccgaacgcgtgacttttgctccacctgcagccttaaaccccgcaacccttttacccgaagaaacagatgagcctgtgacgcatgactgtcaccagctcttgattgaagaaactggcgtacgcaaagacctcaccgatattccattaacaggtgaggtacttacgtggtttaccgatgggtcctcttatgtcgtcgaaggcaaacgtatggctggtgccgccgttgttgatggcacccgtactatctgggcaagcagcttacccgaaggcacgagtgctcagaaagcagagttgatggccttgacccaagccttacgccttgctgaagggaaatcgatcaatatttacaccgactcacgctatgcattcgccacggcacatgtacacggtgccatctacaaacaacgtggtttgttaacttctgctggccgcgagattaagaacaaagaagaaatcctttccttacttgaagccttacacctccccaaacgtctcgctattattcattgtccagggcatcagaaagcaaaagatcctatcagccgtgggaatcaaatggcagatcgtgtcgctaaacaggcagcccaaggcgttaacttgttgcccatgattgagacccctaaagctcca

SEQ ID NO: 4 - protein, 687 aa, synthetic construct
  REGION 1..687: note = Engineered reverse transcriptase variants
MHHHHHHGGSGVLTLQLDDEYRLYSPLVKPDQNIQFWLEQFPQAWAETAGMGLAKQVPPQVIQLKASATPVSVRQYPLSKEAQEGIRPHVQRLIQQGILVPVQSPWNTPLLPVKKPGTNDYRPVQDLREVNKRVQDIHPTVPNPYNLLCALPPQRSWYTVLDLKDAFFCLRLHPTSQPLFAFEWRDPDTGRTGQLTWTRLPQGFKNSPTLFDEALHRDLANFRIQHPQVTLLQYVDDLLLAGATKQDCLEGTKALLLELSDLGYRASAKKAQICRREVTYLGYSLRDGQRWLTEARKKTVVQIPAPKTAKQMREFLGTAGFCRLWIPGFATLAAPLYPLTKEKGEFSWAPEHQKAFDAIKKALLSAPALALPDVTKPFTLYVDERKGVARGVLTQTLGPWRRPVAYLSKKLDPVASGWPVCLKAIAAVAILVKDADKLTLGQNITVIAPHALENIVRQPPDRWMTNARMTHYQSLLLTERVTFAPPAALNPATLLPEETDEPVTHDCHQLLIEETGVRKDLTDIPLTGEVLTWFTDGSSYVVEGKRMAGAAVVDGTRTIWASSLPEGTSAQKAELMALTQALRLAEGKSINIYTDSRYAFATAHVHGAIYKQRGLLTSAGREIKNKEEILSLLEALHLPKRLAIIHCPGHQKAKDPISRGNQMADRVAKQAAQGVNLLPMIETPKAP

SEQ ID NO: 5 - DNA, 2061 bp, synthetic construct
  misc_feature 1..2061: note = Engineered reverse transcriptase variants
  source 1..2061: mol_type = other DNA
atgcatcaccatcaccatcatggtggtagcggagtgctgacccttcagctggatgatgaatatcgcttgtacagtccgctggtcaaaccagaccaaaacattcagttctggctcgaacagtttccgcaagcgtgggctgaaactgcaggcatgggcctggccaaacaggttcctcctcaggtaatccaattaaaggcatctgccacgccggtgtcagttcgtcagtatccgctgtcgaaagaagcgcaagaggggattcgcccacacgtccagcgtttgatccaacagggcattctggtaccggttcaaagcccctggaataccccgcttttaccagtcaagaaaccgggtacaaacgattaccgtcctgtgcaagacctgcgcgaagtcaataaacgtgtgcaggatatccacccaaccgttccgaacccgtataatctgttgtgcgcgttaccgccgcagcgttcctggtacacggtgctggacctgaaggacgcgttcttctgtcttcgcctccatcccaccagccagccactgtttgcctttgaatggcgcgatcctgatacgggccgtactgggcaattaacatggacccgtttgccgcagggctttaagaacagtcccaccatttttgatgaggctcttcaccgcgacctcgcaaatttccgcatccaacacccacaggtaacgttactccagtatgtcgatgatcttttgttagcgggtgccaccaaacaggactgcttggaaggaacgaaagcacttctcttggaactctcggatttaggttatcgtgcgtccgccaagaaagctcagatttgtcgccgcgaagtgacatacttaggctattcattgcgtgatggtcaacgttggcttactgaggcgcgcaagaagaccgttgttcaaatccccgcccctacgacccctaaacagatgcgtgaatttcttggcacggcaggtttctgccgtttgtggattcctggctttgctaccttagcggcacccctctatccactcacgaaagagaaaggagaattctcttgggccccagaacatcagaaagcgtttgacgccatcaagaaagcgttattaagcgctcctgctcttgcattgcccgatgtcaccaaaccattcacgctctacgtggatgaacgcaaaggcgtagcccgcggtgtgttgacacagaccttaggaccttggcgtcgtcccgtggcctacctctcgaagaaacttgacccagttgcaagtggttggcctgtctgcttgaaagctattgccgcagttgcaatcctcgtcaaagatgccgacaaacttactttgggccagaacattactgttattgcaccacacgcccttgaaaacatcgttcgtcagccacctgatcgctggatgaccaatgctcgcatgacgcattatcagagcctcttgcttaccgaacgcgtgacttttgctccacctgcagccttaaaccccgcaacccttttacccgaagaaacagatgagcctgtgacgcatgactgtcaccagctcttgattgaagaaactggcgtacgcaaagacctcaccgatattccattaacaggtgaggtacttacgtggtttaccgatgggtcctcttatgtcgtcgaaggcaaacgtatggctggtgccgccgttgttgatggcacccgtactatctgggcaagcagcttacccgaaggcacgagtgctcagaaagcagagttgatggccttgacccaagccttacgccttgctgaagggaaatcgatcaatatttacaccgactcacgctatgcattcgccacggcacatgtacacggtgccatctacaaacaacgtggtttgttaacttctgctggccgcgagattaagaacaaagaagaaatcctttccttacttgaagccttacacctccccaaacgtctcgctattattcattgtccagggcatcagaaagcaaaagatcctatcagccgtgggaatcaaatggcagatcgtgtcgctaaacaggcagcccaaggcgttaacttgttgcccatgattgagacccctaaagctcca

SEQ ID NO: 6 - protein, 687 aa, synthetic construct
  REGION 1..687: note = Engineered reverse transcriptase variants
MHHHHHHGGSGVLTLQLDDEYRLYSPLVKPDQNIQFWLEQFPQAWAETAGMGLAKQVPPQVIQLKASATPVSVRQYPLSKEAQEGIRPHVQRLIQQGILVPVQSPWNTPLLPVKKPGTNDYRPVQDLREVNKRVQDIHPTVPNPYNLLCALPPQRSWYTVLDLKDAFFCLRLHPTSQPLFAFEWRDPDTGRTGQLTWTRLPQGFKNSPTIFDEALHRDLANFRIQHPQVTLLQYVDDLLLAGATKQDCLEGTKALLLELSDLGYRASAKKAQICRREVTYLGYSLRDGQRWLTEARKKTVVQIPAPTTPKQMREFLGTAGFCRLWIPGFATLAAPLYPLTKEKGEFSWAPEHQKAFDAIKKALLSAPALALPDVTKPFTLYVDERKGVARGVLTQTLGPWRRPVAYLSKKLDPVASGWPVCLKAIAAVAILVKDADKLTLGQNITVIAPHALENIVRQPPDRWMTNARMTHYQSLLLTERVTFAPPAALNPATLLPEETDEPVTHDCHQLLIEETGVRKDLTDIPLTGEVLTWFTDGSSYVVEGKRMAGAAVVDGTRTIWASSLPEGTSAQKAELMALTQALRLAEGKSINIYTDSRYAFATAHVHGAIYKQRGLLTSAGREIKNKEEILSLLEALHLPKRLAIIHCPGHQKAKDPISRGNQMADRVAKQAAQGVNLLPMIETPKAP

SEQ ID NO: 7 - DNA, 2061 bp, synthetic construct
  misc_feature 1..2061: note = Engineered reverse transcriptase variants
  source 1..2061: mol_type = other DNA
atgcatcaccatcaccatcatggtggtagcggagtgctgacccttcagctggatgatgaatatcgcttgtacagtccgctggtcaaaccagaccaaaacattcagttctggctcgaacagtttccgcaagcgtgggctgaaactggcggcatgggcctggccaaacaggttcctcctcaggtaatccaattaaaggcatctgccacgccggtgtcagttcgtcagtatccgctgtcgaaagaagcgcaagaggggattcgcccacacgtgcagcgtttgatccagcagggcattctggtaccggttcaaagcccctggaataccccgcttttaccagtccgcaaaccgggtacaaacgattaccgtcctgtgcaagacctgcgcgaagtcaataaacgtgtgcaggatatccacccaaccgttccgaacccgtataatctgttgtgcgcgttaccgccgcagcgttcctggtacacggtgctggacctgaaggacgcgttcttctgtcttcgcctccaccccaccagccagccactgtttgcctttgaatggcgcgatcctgatacgggccgtactgggcaattaacatggacccgtttgccgcagggctttaagaacagtcccaccatttttgatgaggctcttcaccgcgacctcgcaaatttccgcatccaacacccacaggtaacgttactccagtatgtcgatgatcttttgttagcgggtgccaccaaacaggactgcttggaaggaacgaaagcacttctcttggaactctcggatttaggttatcgtgcgtccgccaagaaagctcagatttgtcgccgcgaagtgacatacttaggctattcattgcgtgatggtcaacgttggcttactgaggcgcgcaagaagaccgttgttcaaatccccgcccctaccaccgcgaaacagatgcgtgaatttcttggcacggcaggtttctgccgtttgtggattcctggctttgctaccttagcggcacccctctatccactcacgaaagagaaaggagaattctcttgggccccagaacatcagaaagcgtttgacgccatcaagaaagcgttattaagcgctcctgctcttgcattgcccgatgtcaccaaaccattcacgctctacgtggatgaacgcaaaggcgtagcccgcggtgtgttgacacagaccttaggaccttggcgtcgtcccgtggcctacctctcgaagaaacttgacccagttgcaagtggttggcctgtctgcttgaaagctattgccgcagttgcaatcctcgtcaaagatgccgacaaacttactttgggccagaacattactgttattgcaccacacgcccttgaaaacatcgttcgtcagccacctgatcgctggatgaccaatgctcgcatgacgcattatcagagcctcttgcttaccgaacgcgtgacttttgctccacctgcagccttaaaccccgcaacccttttacccgaagaaacagatgagcctgtgacgcatgactgtcaccagctcttgattgaagaaactggcgtacgcaaagacctcaccgatattccattaacaggtgaggtacttacgtggtttaccgatgggtcctcttatgtcgtcgaaggcaaacgtatggctggtgccgccgttgttgatggcacccgtactatctgggcaagcagcttacccgaaggcacgagtgctcagaaagcagagttgatggccttgacccaagccttacgccttgctgaagggaaatcgatcaatatttacaccgactcacgctatgcattcgccacggcacatgtacacggtgccatctacaaacaacgtggtttgttaacttctgctggccgcgagattaagaacaaagaagaaatcctttccttacttgaagccttacacctccccaaacgtctcgctattattcattgtccagggcatcagaaagcaaaagatcctatcagccgtgggaatcaaatggcagatcgtgtcgctaaacaggcagcccaaggcgttaacttgttgcccatgattgagacccctaaagctcca

SEQ ID NO: 8 - protein, 687 aa, synthetic construct
  REGION 1..687: note = Engineered reverse transcriptase variants
MHHHHHHGGSGVLTLQLDDEYRLYSPLVKPDQNIQFWLEQFPQAWAETGGMGLAKQVPPQVIQLKASATPVSVRQYPLSKEAQEGIRPHVQRLIQQGILVPVQSPWNTPLLPVRKPGTNDYRPVQDLREVNKRVQDIHPTVPNPYNLLCALPPQRSWYTVLDLKDAFFCLRLHPTSQPLFAFEWRDPDTGRTGQLTWTRLPQGFKNSPTIFDEALHRDLANFRIQHPQVTLLQYVDDLLLAGATKQDCLEGTKALLLELSDLGYRASAKKAQICRREVTYLGYSLRDGQRWLTEARKKTVVQIPAPTTAKQMREFLGTAGFCRLWIPGFATLAAPLYPLTKEKGEFSWAPEHQKAFDAIKKALLSAPALALPDVTKPFTLYVDERKGVARGVLTQTLGPWRRPVAYLSKKLDPVASGWPVCLKAIAAVAILVKDADKLTLGQNITVIAPHALENIVRQPPDRWMTNARMTHYQSLLLTERVTFAPPAALNPATLLPEETDEPVTHDCHQLLIEETGVRKDLTDIPLTGEVLTWFTDGSSYVVEGKRMAGAAVVDGTRTIWASSLPEGTSAQKAELMALTQALRLAEGKSINIYTDSRYAFATAHVHGAIYKQRGLLTSAGREIKNKEEILSLLEALHLPKRLAIIHCPGHQKAKDPISRGNQMADRVAKQAAQGVNLLPMIETPKAP

SEQ ID NO: 9 - DNA, 2061 bp, synthetic construct
  misc_feature 1..2061: note = Engineered reverse transcriptase variants
  source 1..2061: mol_type = other DNA
atgcatcaccatcaccatcatggtggtagcggagtgctgacccttcagctggatgatgaataccgcttgtacagtccgctggtcaaaccagaccaaaacattcagttctggctcgaacagtttccgcaagcgtgggctgaaactgcaggcatgggcctggccaaacaggttcctcctcaggtaatcccgttaaaggcatcttcgacgccggtgtcagttcgtcagtatccgctgtcgaaagaagcgcaagaggggattcgcccacacgtgcagcgtttgatccagcagggcattctggtaccggttcaaagcccctggaataccccgcttttaccagtccgcaaaccgggtacaaacgattaccgtcctgtgcaagacctgcgcgaagtcaataaacgtgtgcaggatatccacccaaccgttccgaacccgtataatctgttgtgcgcgttaccgccgcagcgttcctggtacacggtgctggacctgaaggacgcgttcttctgtcttcgcctccaccccaccagccagccactgtttgcctttgaatggcgcgatcctgatacgggccgtactgggcaattaacatggacccgtttgccgcagggctttaagaacagtcccaccatttttgatgaggctcttcgccgcgacctcgcaaatttccgcatccaacacccacaggtaacgttactccagtatgtcgatgatcttttgttagcgggtgccaccaaacaggactgcttggaaggaacgaaagcacttctcttgaccctctcgaatttaggttatcgtgcgtccgccaagaaagctcagatttgtcgccgcgaagtgacatacttaggctattcattgcgtgatggtcaacgttggcttactgaggcgcgcaagaagaccgttgttcaaatccccgcccctaccaccgcgaaacagatgcgtgaatttcttggcacggcaggtttctgccgtttgtggattcctggctttgctaccttagcggcacccctctatccactcacgaaagagaaaggagaattctcttgggccccagaacatcagaaagcgtttgacgccatcaagaaagcgttattaagcgctcctgctcttgcattgcccgatgtcaccaaaccattcacgctctacgtggatgaacgcaaaggcgtagcccgcggtgtgttgacacagaccttaggaccttggcgtcgtcccgtggcctacctctcgaagaaacttgacccagttgcaagtggttggcctgtctgcttgaaagctattgccgcagttgcaatcctcgtcaaagatgccgacaaacttactttgggccagaacattactgttattgcaccacacgcccttgaaaacatcgttcgtcagccacctgatcgctggatgaccaatgctcgcatgacgcattatcagagcctcttgcttaccgaacgcgtgacttttgctccacctgcagccttaaaccccgcaacccttttacccgaagaaacagatgagcctgtgacgcatgactgtcaccagctcttgattgaagaaactggcgtacgcaaagacctcaccgatattccattaacaggtgaggtacttacgtggtttaccgatgggtcctcttatgtcgtcgaaggcaaacgtatggctggtgccgccgttgttgatggcacccgtactatctgggcaagcagcttacccgaaggcacgagtgctcagaaagcagagttgatggccttgacccaagccttacgccttgctgaagggaaatcgatcaatatttacaccgactcacgctatgcattcgccacggcacatgtacacggtgccatctacaaacaacgtggtttgttaacttctgctggccgcgagattaagaacaaagaagaaatcctttccttacttgaagccttacacctccccaaacgtctcgctattattcattgtccagggcatcagaaagcaaaagatcctatcagccgtgggaatcaaatggcagatcgtgtcgctaaacaggcagcccaaggcgttaacttgttgcccatgattgagacccctaaagctcca

SEQ ID NO: 10 - protein, 687 aa, synthetic construct
  REGION 1..687: note = Engineered reverse transcriptase variants
MHHHHHHGGSGVLTLQLDDEYRLYSPLVKPDQNIQFWLEQFPQAWAETAGMGLAKQVPPQVIPLKASSTPVSVRQYPLSKEAQEGIRPHVQRLIQQGILVPVQSPWNTPLLPVRKPGTNDYRPVQDLREVNKRVQDIHPTVPNPYNLLCALPPQRSWYTVLDLKDAFFCLRLHPTSQPLFAFEWRDPDTGRTGQLTWTRLPQGFKNSPTIFDEALRRDLANFRIQHPQVTLLQYVDDLLLAGATKQDCLEGTKALLLTLSNLGYRASAKKAQICRREVTYLGYSLRDGQRWLTEARKKTVVQIPAPTTAKQMREFLGTAGFCRLWIPGFATLAAPLYPLTKEKGEFSWAPEHQKAFDAIKKALLSAPALALPDVTKPFTLYVDERKGVARGVLTQTLGPWRRPVAYLSKKLDPVASGWPVCLKAIAAVAILVKDADKLTLGQNITVIAPHALENIVRQPPDRWMTNARMTHYQSLLLTERVTFAPPAALNPATLLPEETDEPVTHDCHQLLIEETGVRKDLTDIPLTGEVLTWFTDGSSYVVEGKRMAGAAVVDGTRTIWASSLPEGTSAQKAELMALTQALRLAEGKSINIYTDSRYAFATAHVHGAIYKQRGLLTSAGREIKNKEEILSLLEALHLPKRLAIIHCPGHQKAKDPISRGNQMADRVAKQAAQGVNLLPMIETPKAP

SEQ ID NO: 11 - DNA, 2061 bp, synthetic construct
  misc_feature 1..2061: note = Engineered reverse transcriptase variants
  source 1..2061: mol_type = other DNA
atgcatcaccatcaccatcatggtggtagcggagtgctgacccttcagctggatgatgaataccgcttgtacagtccgctggtcaaaccagaccaaaacattcagttctggctcgaacagtttccgcaagcgtgggctgaaactgcaggcatgggcctggccaaacaggttcctcctcaggtaatcccgttaaaggcatcttcgacgccggtgtcagttcgtcagtatccgctgtcgaaagaagcgcaagaggggattcgcccacacgtgcagcgtttgatccagcagggcattctggtaccggttcaaagcccctggaataccccgcttttaccagtccgcaaaccgggtacaaacgattaccgtcctgtgcaagacctgcgcgaagtcaataaacgtgtgcaggatatccacccaaccgttccgaacccgtataatctgttgtgcgcgttaccgccgcagcgttcctggtacacggtgctggacctgaaggacgcgttcttctgtcttcgcctccaccccaccagccagccactgtttgcctttgaatggcgcgatcctgatacgggccgtactgggcaattaacatggacccgtttgccgcagggctttaagaacagtcccaccatttttgatgaggctcttcgccgcgacctcgcaaatttccgcatccaacacccacaggtaacgttactccagtatgtcgatgatcttttgttagcgggtgccaccaaacaggactgcttggaaggaacgaaagcacttctcttggagctctcgaatttaggttatcgtgcgtccgccaagaaagctcagatttgtcgccgcgaagtgacatacttaggctattcattgcgtgatggtcaacgttggcttactgaggcgcgcaagaagaccgttgttcaaatccccgcccctaccaccgcgaaacagatgcgtgaatttcttggcacggcaggtttctgccgtttgtggattcctggctttgctaccctggcggcacccctctatccactcacgaaagaaaaaggagaattctcttgggccccagaacatcagaaagcgtttgacgccatcaagaaagcgttattaagcgctcctgctcttgcattgcccgatgtcaccaaaccattcacgctctacgtggatgaacgcaaaggcgtagcccgcggtgtgttgacacagaccttaggaccttggcgtcgtcccgtggcctacctctcgaagaaacttgacccagttgcaagtggttggcctgtctgcttgaaagctattgccgcagttgcaatcctcgtcaaagatgccgacaaacttactttgggccagaacattactgttattgcaccacacgcccttgaaaacatcgttcgtcagccacctgatcgctggatgaccaatgctcgcatgacgcattatcagagcctcttgcttaccgaacgcgtgacttttgctccacctgcagccttaaaccccgcaacccttttacccgaagaaacagatgagcctgtgacgcatgactgtcaccagctcttgattgaagaaactggcgtacgcaaagacctcaccgatattccattaacaggtgaggtacttacgtggtttaccgatgggtcctcttatgtcgtcgaaggcaaacgtatggctggtgccgccgttgttgatggcacccgtactatctgggcaagcagcttacccgaaggcacgagtgctcagaaagcagagttgatggccttgacccaagccttacgccttgctgaagggaaatcgatcaatatttacaccgactcacgctatgcattcgccacggcacatgtacacggtgccatctacaaacaacgtggtttgttaacttctgctggccgcgagattaagaacaaagaagaaatcctttccttacttgaagccttacacctccccaaacgtctcgctattattcattgtccagggcatcagaaagcaaaagatcctatcagccgtgggaatcaaatggcagatcgtgtcgctaaacaggcagcccaaggcgttaacttgttgcccatgattgagacccctaaagctcca

SEQ ID NO: 12 - protein, 687 aa, synthetic construct
  REGION 1..687: note = Engineered reverse transcriptase variants
MHHHHHHGGSGVLTLQLDDEYRLYSPLVKPDQNIQFWLEQFPQAWAETAGMGLAKQVPPQVIPLKASSTPVSVRQYPLSKEAQEGIRPHVQRLIQQGILVPVQSPWNTPLLPVRKPGTNDYRPVQDLREVNKRVQDIHPTVPNPYNLLCALPPQRSWYTVLDLKDAFFCLRLHPTSQPLFAFEWRDPDTGRTGQLTWTRLPQGFKNSPTIFDEALRRDLANFRIQHPQVTLLQYVDDLLLAGATKQDCLEGTKALLLELSNLGYRASAKKAQICRREVTYLGYSLRDGQRWLTEARKKTVVQIPAPTTAKQMREFLGTAGFCRLWIPGFATLAAPLYPLTKEKGEFSWAPEHQKAFDAIKKALLSAPALALPDVTKPFTLYVDERKGVARGVLTQTLGPWRRPVAYLSKKLDPVASGWPVCLKAIAAVAILVKDADKLTLGQNITVIAPHALENIVRQPPDRWMTNARMTHYQSLLLTERVTFAPPAALNPATLLPEETDEPVTHDCHQLLIEETGVRKDLTDIPLTGEVLTWFTDGSSYVVEGKRMAGAAVVDGTRTIWASSLPEGTSAQKAELMALTQALRLAEGKSINIYTDSRYAFATAHVHGAIYKQRGLLTSAGREIKNKEEILSLLEALHLPKRLAIIHCPGHQKAKDPISRGNQMADRVAKQAAQGVNLLPMIETPKAP

SEQ ID NO: 13 - DNA, 2061 bp, synthetic construct
  misc_feature 1..2061: note = Engineered reverse transcriptase variants
  source 1..2061: mol_type = other DNA
atgcatcaccatcaccatcatggtggtagcggagtgctgacccttcagctggatgatgaatatcgcttgtacagtccgctggtcaaaccagaccaaaacattcagttctggctcgaacagtttccgcaagcgtgggctgaaactgcaggcatgggcctggccaaacaggttcctcctcaggtaatcctgttaaaggcatctgccacgccggtgtcagttcgtcagtatccgctgagtaaagaagcgcaagaggggattcgcccacacgtgcagcgtttgatccagcagggcattctggtaccggttcaaagcccctggaataccccgcttttaccagtccgcaaaccgggtacaaacgattaccgtcctgtgcaagacctgcgcgaagtcaataaacgtgtgcaggatatccacccaaccgttccgaacccgtataatctgttgtgcgcgttaccgccgcagcgttcctggtacacggtgctggacctgaaggacgcgttcttctgtcttcgcctccaccccaccagccagccactgtttgcctttgaatggcgcgatcctgatacgggccgtactgggcaattaacatggacccgtttgccgcagggctttaagaacagtcccgccatttttgatgaggctcttcaccgcgacctcgcaaatttccgcatccaacacccacaggtaacgttactccagtatgtcgatgatcttttgttagcgggtgccaccaaacaggactgcttggaaggaacgaaagcacttctcttggaactctcggatttaggttatcgtgcgtccgccaagaaagctcagatttgtcgccgcgaagtgacatacttaggctattcattgcgtgatggtcaacgttggcttactgaggcgcgcaagaagaccgttgttcaaatccccgcccctaccaccgcgaaacagatgcgtaagtttcttggcacggcaggtttctgccgtttgtggattcctggctttgctaccttagcggcacccctctatccactcacgaaagagaaaggagaattctcttgggccccagaacatcagaaagcgtttgacgccatcaagaaagcgttattaagcgctcctgctcttgcattgcccgatgtcaccaaaccattcacgctctacgtggatgaacgcaaaggcgtagcccgcggtgtgttgacacagaccttaggaccttggcgtcgtcccgtggcctacctctcgaagaaacttgacccagttgcaagtggttggcctgtctgcttgaaagctattgccgcagttgcaatcctcgtcaaagatgccgacaaacttactttgggccagaacattactgttattgcaccacacgcccttgaaaacatcgttcgtcagccacctgatcgctggatgaccaatgctcgcatgacgcattatcagagcctcttgcttaccgaacgcgtgacttttgctccacctgcagccttaaaccccgcaacccttttacccgaagaaacagatgagcctgtgacgcatgactgtcaccagctcttgattgaagaaactggcgtacgcaaagacctcaccgatattccattaacaggtgaggtacttacgtggtttaccgatgggtcctcttatgtcgtcgaaggcaaacgtatggctggtgccgccgttgttgatggcacccgtactatctgggcaagcagcttacccgaaggcacgagtgctcagaaagcagagttgatggccttgacccaagccttacgccttgctgaagggaaatcgatcaatatttacaccgactcacgctatgcattcgccacggcacatgtacacggtgccatctacaaacaacgtggtttgttaacttctgctggccgcgagattaagaacaaagaagaaatcctttccttacttgaagccttacacctccccaaacgtctcgctattattcattgtccagggcatcagaaagcaaaagatcctatcagccgtgggaatcaaatggcaaaccgtgtcgctaaacaggcagcccaaggcgttaacttgttgcccatgattgagacccctaaagctcca

SEQ ID NO: 14 - protein, 687 aa, synthetic construct
  REGION 1..687: note = Engineered reverse transcriptase variants
MHHHHHHGGSGVLTLQLDDEYRLYSPLVKPDQNIQFWLEQFPQAWAETAGMGLAKQVPPQVILLKASATPVSVRQYPLSKEAQEGIRPHVQRLIQQGILVPVQSPWNTPLLPVRKPGTNDYRPVQDLREVNKRVQDIHPTVPNPYNLLCALPPQRSWYTVLDLKDAFFCLRLHPTSQPLFAFEWRDPDTGRTGQLTWTRLPQGFKNSPAIFDEALHRDLANFRIQHPQVTLLQYVDDLLLAGATKQDCLEGTKALLLELSDLGYRASAKKAQICRREVTYLGYSLRDGQRWLTEARKKTVVQIPAPTTAKQMRKFLGTAGFCRLWIPGFATLAAPLYPLTKEKGEFSWAPEHQKAFDAIKKALLSAPALALPDVTKPFTLYVDERKGVARGVLTQTLGPWRRPVAYLSKKLDPVASGWPVCLKAIAAVAILVKDADKLTLGQNITVIAPHALENIVRQPPDRWMTNARMTHYQSLLLTERVTFAPPAALNPATLLPEETDEPVTHDCHQLLIEETGVRKDLTDIPLTGEVLTWFTDGSSYVVEGKRMAGAAVVDGTRTIWASSLPEGTSAQKAELMALTQALRLAEGKSINIYTDSRYAFATAHVHGAIYKQRGLLTSAGREIKNKEEILSLLEALHLPKRLAIIHCPGHQKAKDPISRGNQMANRVAKQAAQGVNLLPMIETPKAP

SEQ ID NO: 15 - DNA, 2061 bp, synthetic construct
  misc_feature 1..2061: note = Engineered reverse transcriptase variants
  source 1..2061: mol_type = other DNA
atgcatcaccatcaccatcatggtggtagcggagtgctgacccttcagctggatgatgaatatcgcttgtacagtccgctggtcaaaccagaccaaaacattcagttctggctcgaacagtttccgcaagcgtgggctgaaactgcaggcatgggcctggccaaacaggttcctcctcaggtaatccagttaaaggcatctgccacgccggtgtcagttcgtcagtatccgctgtcgaaagaagcgcaagaggggattcgcccacacgtgcagcgtttgatccagcagggcattctggtaccggttcaaagcccctggaataccccgcttttaccagtccgcaaaccgggtacaaacgattaccgtcctgtgcaagacctgcgcgaagtcaataaacgtgtgcaggatatccacccaaccgttccgaacccgtataatctgttgtgcgcgttaccgccgcagcgttcctggtacacggtgctggacctgaaggacgcgttcttctgtcttcgcctccaccccaccagccagccactgtttgcctttgaatggcgcgatcctgatacgggccgtactgggcaattaacatggacccgtttgccgcagggctttaagaacagtcccaccatttttgatgaggctcttcaccgcgacctcgcaaatttccgcatccaacacccacaggtaacgttactccagtatgtcgatgatcttttgttagcgggtgccaccaaacaggactgcttggaaggaacgaaagcacttctcttggaactctcggatttaggttatcgtgcgtccgccaagaaagctcagatttgtcgccgcgaagtgacatacttaggctattcattgcgtgatggtcaacgttggcttactgaggcgcgcaagaagaccgttgttcaaatccccgcccctaccaccgcgaaacagatgcgtgaatttcttggcacggcaggtttctgccgtttgtggattcctggctttgctaccttagcggcacccctctatccactcacgaaagagaaaggagaattctcttgggccccagaacatcagaaagcgtttgacgccatcaagaaagcgttattaagcgctcctgctcttgcattgcccgatgtcaccaaaccattcacgctctacgtggatgaacgcaaaggcgtagcccgcggtgtgttgacacagaccttaggaccttggcgtcgtcccgtggcctacctctcgaagaaacttgacccagttgcaagtggttggcctgtctgcttgaaagctattgccgcagttgcaatcctcgtcaaagatgccgacaaacttactttgggccagaacattactgttggcgcaccacacgcccttgaaaacatcgttcgtcagccacctgatcgctggatgaccaatgctcgcatgacgcattatcagagcctcttgcttaccgaacgcgtgacttttgctccacctgcagccttaaaccccgcaacccttttacccgaagaaacagatgagcctgtgacgcatgactgtcaccagctcttgattgaagaaactggcgtacgcaaagacctcaccgatattccattaacaggtgaggtacttacgtggtttaccgatgggtcctcttatgtcgtcgaaggcaaacgtatggctggtgccgccgttgttgatggcacccgtactatctgggcaagcagcttacccgaaggcacgagtgctcagaaagcagagttgatggccttgacccaagccttacgccttgctgaagggaaatcgatcaatatttacaccgactcacgctatgcattcgccacggcacatgtacacggtgccatctacaaacaacgtggtttgttaacttctgctggccgcgagattaagaacaaagaagaaatcctttccttacttgaagccttacacctccccaaacgtctcgctattattcattgtccagggcatcagaaagcaaaagatcctatcagccgtgggaatcaaatggcaaaccgtgtcgctaaacaggcagcccaaggcgttaacttgttgcccatgattgagacccctaaagctcca

SEQ ID NO: 16 - protein, 687 aa, synthetic construct
  REGION 1..687: note = Engineered reverse transcriptase variants
MHHHHHHGGSGVLTLQLDDEYRLYSPLVKPDQNIQFWLEQFPQAWAETAGMGLAKQVPPQVIQLKASATPVSVRQYPLSKEAQEGIRPHVQRLIQQGILVPVQSPWNTPLLPVRKPGTNDYRPVQDLREVNKRVQDIHPTVPNPYNLLCALPPQRSWYTVLDLKDAFFCLRLHPTSQPLFAFEWRDPDTGRTGQLTWTRLPQGFKNSPTIFDEALHRDLANFRIQHPQVTLLQYVDDLLLAGATKQDCLEGTKALLLELSDLGYRASAKKAQICRREVTYLGYSLRDGQRWLTEARKKTVVQIPAPTTAKQMREFLGTAGFCRLWIPGFATLAAPLYPLTKEKGEFSWAPEHQKAFDAIKKALLSAPALALPDVTKPFTLYVDERKGVARGVLTQTLGPWRRPVAYLSKKLDPVASGWPVCLKAIAAVAILVKDADKLTLGQNITVGAPHALENIVRQPPDRWMTNARMTHYQSLLLTERVTFAPPAALNPATLLPEETDEPVTHDCHQLLIEETGVRKDLTDIPLTGEVLTWFTDGSSYVVEGKRMAGAAVVDGTRTIWASSLPEGTSAQKAELMALTQALRLAEGKSINIYTDSRYAFATAHVHGAIYKQRGLLTSAGREIKNKEEILSLLEALHLPKRLAIIHCPGHQKAKDPISRGNQMANRVAKQAAQGVNLLPMIETPKAP

SEQ ID NO: 17 - DNA, 2061 bp, synthetic construct
  misc_feature 1..2061: note = Engineered reverse transcriptase variants
  source 1..2061: mol_type = other DNA
atgcatcaccatcaccatcatggtggtagcggagtgctgacccttcagctggatgatgaatatcgcttgtacagtccgctggtcaaaccagaccaaaacattcagttctggctcgaacagtttccgcaagcgtgggctgaaactgcaggcatgggcctggccaaacaggttcctcctcaggtaatccaattaaaggcatctgccacgccggtgtcagttcgtcagtatccgctgtcgaaagaagcgcaagaggggattcgcccacacgtccagcgtttgatccaacagggcattctggtaccggttcaaagcccctggaataccccgcttttaccagtccgcaaaccgggtacaaacgattaccgtcctgtgcaagacctgcgcgaagtcaataaacgtgtgcaggatatccacccaaccgttccgaacccgtataatctgttgtgcgcgttaccgccgcagcgttcctggtacacggtgctggacctgaaggacgcgttcttctgtcttcgcctccaccccaccagccagccactgtttgcctttgaatggcgcgatcctgatacgggccgtactgggcaattaacatggacccgtttgccgcagggctttaagaacagtcccaccatctttgatgaggctcttcaccgcgacctcgcaaatttccgcatccaacacccacaggtaacgttactccagtatgtcgatgatcttttgttagcgggtgccaccaaacaggactgcttggaaggaacgaaagcacttctcttggaactctcggatttaggttatcgtgcgtccgccaagaaagctcagatttgtcgccgcgaagtgacatacttaggctattcattgcgtgatggtcaacgttggcttactgaggcgcgcaagaagaccgttgttcaaatccccgcccctacgaccgctaaacagatgcgtgaatttcttggcacggcaggtttctgccgtttgtggattcctggctttgctgagttagcggcacccctctatccactcacgaaagagaaaggagaattctcttgggccccagaacatcagaaagcgtttgacgccatcaagaaagcgttattaagcgctcctgctcttgcattgcccgatgtcaccaaaccattcacgctctacgtggatgaacgcaaaggcgtagcccgcggtgtgttgacacagaccttaggaccttggcgtcgtcccgtggcctacctctcgaagaaacttgacccagttgcaagtggttggcctgtctgcttgaaagctattgccgcagttgcaatcctcgtcaaagatgccgacaaacttactttgggccagaacattactgttattgcaccacacgcccttgaaaacatcgttcgtcagccacctgatcgctggatgaccaatgctcgcatgacgcattatcagagcctcttgcttaccgaacgcgtgacttttgctccacctgcagccttaaaccccgcaacccttttacccgaagaaacagatgagcctgtgacgcatgactgtcaccagctcttgattgaagaaactggcgtacgcaaagacctcaccgatattccattaacaggtgaggtacttacgtggtttaccgatgggtcctcttatgtcgtcgaaggcaaacgtatggctggtgccgccgttgttgatggcacccgtactatctgggcaagcagcttacccgaaggcacgagtgctcagaaagcagagttgatggccttgacccaagccttacgccttgctgaagggaaatcgatcaatatttacaccgactcacgctatgcattcgccacggcacatgtacacggtgccatctacaaacaacgtggtttgttaacttctgctggccgcgagattaagaacaaagaagaaatcctttccttacttgaagccttacacctccccaaacgtctcgctattattcattgtccagggcatcagaaagcaaaagatcctatcagccgtgggaatcaaatggcagatcgtgtcgctaaacaggcagcccaaggcgttaacttgttgcccatgattgagacccctaaagctcca

SEQ ID NO: 18 - protein, 687 aa, synthetic construct
  REGION 1..687: note = Engineered reverse transcriptase variants
MHHHHHHGGSGVLTLQLDDEYRLYSPLVKPDQNIQFWLEQFPQAWAETAGMGLAKQVPPQVIQLKASATPVSVRQYPLSKEAQEGIRPHVQRLIQQGILVPVQSPWNTPLLPVRKPGTNDYRPVQDLREVNKRVQDIHPTVPNPYNLLCALPPQRSWYTVLDLKDAFFCLRLHPTSQPLFAFEWRDPDTGRTGQLTWTRLPQGFKNSPTIFDEALHRDLANFRIQHPQVTLLQYVDDLLLAGATKQDCLEGTKALLLELSDLGYRASAKKAQICRREVTYLGYSLRDGQRWLTEARKKTVVQIPAPTTAKQMREFLGTAGFCRLWIPGFAELAAPLYPLTKEKGEFSWAPEHQKAFDAIKKALLSAPALALPDVTKPFTLYVDERKGVARGVLTQTLGPWRRPVAYLSKKLDPVASGWPVCLKAIAAVAILVKDADKLTLGQNITVIAPHALENIVRQPPDRWMTNARMTHYQSLLLTERVTFAPPAALNPATLLPEETDEPVTHDCHQLLIEETGVRKDLTDIPLTGEVLTWFTDGSSYVVEGKRMAGAAVVDGTRTIWASSLPEGTSAQKAELMALTQALRLAEGKSINIYTDSRYAFATAHVHGAIYKQRGLLTSAGREIKNKEEILSLLEALHLPKRLAIIHCPGHQKAKDPISRGNQMADRVAKQAAQGVNLLPMIETPKAP

SEQ ID NO: 19 - DNA, 2061 bp, synthetic construct
  misc_feature 1..2061: note = Engineered reverse transcriptase variants
  source 1..2061: mol_type = other DNA
atgcatcaccatcaccatcatggtggtagcggagtgctgacccttcagctggatgatgaatatcgcttgtacagtccgctggtcaaaccagaccaaaacattcagttctggctcgaacagtttccgcaagcgtgggctgaaactgcaggcatgggcctggccaaacaggttcctcctcaggtaatccaattaaaggcatctgccacgccggtgtcagttcgtcagtatccgctgtcgaaagaagcgcaagaggggattcgcccacacatccagcgtttgatccaacagggcattctggtaccggttcaaagcccctggaataccccgcttttaccagtccgcaaaccgggtacaaacgattaccgtcctgtgcaagacctgcgcgaagtcaataaacgtgtgcaggatatccacccaaccgttccgaacccgtataatctgttgtgcgcgttaccgccgcagcgttcctggtacacggtgctggacctgaaggacgcgttcttctgtcttcgcctccatcccaccagccagccactgtttgcctttgaatggcgcgatcctgatacgggccgtactgggcaattaacatggacccgtttgccgcagggctttaagaacagtcccaccatttttgatgaggctcttcaccgcgacctcgcaaatttccgcatccaacacccacaggtaacgttactccagtatgtcgatgatcttttgttagcgggtgccaccaaacaggactgcttggaaggaacgaaagcacttctcttggaactctcggatttaggttatcgtgcgtccgccaagaaagctcagatttgtcgccgcgaagtgacatacttaggctattcattgcgtgatggtcaacgttggcttactgaggcgcgcaagaagaccgttgttcaaatccccgcccctaagaccgctaaacagatgcgtgaatttcttggcacggcaggtttctgccgtttgtggattcctggctttgctactttagcggcacccctctatccactcacgaaagagaaaggagaattctcttggggcccagaacatcagaaagcgtttgacgccatcaagaaagcgttattaagcgctcctgctcttgcattgcccgatgtcaccaaaccattcacgctctacgtggatgaacgcaaaggcgtagcccgcggtgtgttgacacagaccttaggaccttggcgtcgtcccgtggcctacctctcgaagaaacttgacccagttgcaagtggttggcctgtctgcttgaaagctattgccgcagttgcaatcctcgtcaaagatgccgacaaacttactttgggccagaacattactgttattgcaccacacgcccttgaaaacatcgttcgtcagccacctgatcgctggatgaccaatgctcgcatgacgcattatcagagcctcttgcttaccgaacgcgtgacttttgctccacctgcagccttaaaccccgcaacccttttacccgaagaaacagatgagcctgtgacgcatgactgtcaccagctcttgattgaagaaactggcgtacgcaaagacctcaccgatattccattaacaggtgaggtacttacgtggtttaccgatgggtcctcttatgtcgtcgaaggcaaacgtatggctggtgccgccgttgttgatggcacccgtactatctgggcaagcagcttacccgaaggcacgagtgctcagaaagcagagttgatggccttgacccaagccttacgccttgctgaagggaaatcgatcaatatttacaccgactcacgctatgcattcgccacggcacatgtacacggtgccatctacaaacaacgtggtttgttaacttctgctggccgcgagattaagaacaaagaagaaatcctttccttacttgaagccttacacctccccaaacgtctcgctattattcattgtccagggcatcagaaagcaaaagatcctatcagccgtgggaatcaaatggcagatcgtgtcgctaaacaggcagcccaaggcgttaacttgttgcccatgattgagacccctaaagctcca

SEQ ID NO: 20 - protein, 687 aa, synthetic construct
  REGION 1..687: note = Engineered reverse transcriptase variants
MHHHHHHGGSGVLTLQLDDEYRLYSPLVKPDQNIQFWLEQFPQAWAETAGMGLAKQVPPQVIQLKASATPVSVRQYPLSKEAQEGIRPHIQRLIQQGILVPVQSPWNTPLLPVRKPGTNDYRPVQDLREVNKRVQDIHPTVPNPYNLLCALPPQRSWYTVLDLKDAFFCLRLHPTSQPLFAFEWRDPDTGRTGQLTWTRLPQGFKNSPTIFDEALHRDLANFRIQHPQVTLLQYVDDLLLAGATKQDCLEGTKALLLELSDLGYRASAKKAQICRREVTYLGYSLRDGQRWLTEARKKTVVQIPAPKTAKQMREFLGTAGFCRLWIPGFATLAAPLYPLTKEKGEFSWGPEHQKAFDAIKKALLSAPALALPDVTKPFTLYVDERKGVARGVLTQTLGPWRRPVAYLSKKLDPVASGWPVCLKAIAAVAILVKDADKLTLGQNITVIAPHALENIVRQPPDRWMTNARMTHYQSLLLTERVTFAPPAALNPATLLPEETDEPVTHDCHQLLIEETGVRKDLTDIPLTGEVLTWFTDGSSYVVEGKRMAGAAVVDGTRTIWASSLPEGTSAQKAELMALTQALRLAEGKSINIYTDSRYAFATAHVHGAIYKQRGLLTSAGREIKNKEEILSLLEALHLPKRLAIIHCPGHQKAKDPISRGNQMADRVAKQAAQGVNLLPMIETPKAP

SEQ ID NO: 21 - DNA, 2061 bp, synthetic construct
  misc_feature 1..2061: note = Engineered reverse transcriptase variants
  source 1..2061: mol_type = other DNA
atgcatcaccatcaccatcatggtggtagcggagtgctgacccttcagctggatgatgaatatcgcttgtacagtccgctggtcaaaccagaccaaaacattcagttctggctcgaacagtttccgcaagcgtgggctgaaactgcaggcatgggcctggccaaacaggttcctcctcaggtaatccaattaaaggcatctgccacgccggtgtcagttcgtcagtatccgctgtcgaaagaagcgcaagaggggattcgcccacacgtccagcgtttgatccaacagggcattctggtaccggttcaaagcccctggaataccccgcttttaccagtcaagaaaccgggtacaaacgattaccgtcctgtgcaagacctgcgcgaagtcaataaacgtgtgcaggatatccacccaaccgttccgaacccgtataatctgttgtgcgcgttaccgccgcagcgttcctggtacacggtgctggacctgaaggacgcgttcttctgtcttcgcctcgctcccaccagccagccactgtttgcctttgaatggcgcgatcctgatacgggccgtactgggcaattaacatggacccgtttgccgcagggctttaagaacagtcccaccatttttgatgaggctcttcaccgcgacctcgcaaatttccgcatccaacacccacaggtaacgttactccagtatgtcgatgatcttttgttagcgggtgccaccaaacaggactgcttggaaggaacgaaagcacttctcttggaactctcggatttaggttatcgtgcgtccgccaagaaagctcagatttgtcgccgcgaagtgacatacttaggctattcattgcgtgatggtcaacgttggcttactgaggcgcgcaagaagaccgttgttcaaatccccgcccctaccaccgcgaaacagatgcgtgaatttcttggcacggcaggtttctgccgtttgtggattcctggctttgctgagttagcggcacccctctatccactcacgaaagagaaaggagaattctcttgggccccagaacatcagaaagcgtttgacgccatcaagaaagcgttattaagcgctcctgctcttgcattgcccgatgtcaccaaaccattcacgctctacgtggatgaacgcaaaggcgtagcccgcggtgtgttgacacagaccttaggaccttggcgtcgtcccgtggcctacctctcgaagaaacttgacccagttgcaagtggttggcctgtctgcttgaaagctattgccgcagttgcaatcctcgtcaaagatgccgacaaacttactttgggccagaacattactgttattgcaccacacgcccttgaaaacatcgttcgtcagccacctgatcgctggatgaccaatgctcgcatgacgcattatcagagcctcttgcttaccgaacgcgtgacttttgctccacctgcagccttaaaccccgcaacccttttacccgaagaaacagatgagcctgtgacgcatgactgtcaccagctcttgattgaagaaactggcgtacgcaaagacctcaccgatattccattaacaggtgaggtacttacgtggtttaccgatgggtcctcttatgtcgtcgaaggcaaacgtatggctggtgccgccgttgttgatggcacccgtactatctgggcaagcagcttacccgaaggcacgagtgctcagaaagcagagttgatggccttgacccaagccttacgccttgctgaagggaaatcgatcaatatttacaccgactcacgctatgcattcgccacggcacatgtacacggtgccatctacaaacaacgtggtttgttaacttctgctggccgcgagattaagaacaaagaagaaatcctttccttacttgaagccttacacctccccaaacgtctcgctattattcattgtccagggcatcagaaagcaaaagatcctatcagccgtgggaatcaaatggcagatcgtgtcgctaaacaggcagcccaaggcgttaacttgttgcccatgattgagacccctaaagctcca

SEQ ID NO: 22 - protein, 687 aa, synthetic construct
  REGION 1..687: note = Engineered reverse transcriptase variants
MHHHHHHGGSGVLTLQLDDEYRLYSPLVKPDQNIQFWLEQFPQAWAETAGMGLAKQVPPQVIQLKASATPVSVRQYPLSKEAQEGIRPHVQRLIQQGILVPVQSPWNTPLLPVKKPGTNDYRPVQDLREVNKRVQDIHPTVPNPYNLLCALPPQRSWYTVLDLKDAFFCLRLAPTSQPLFAFEWRDPDTGRTGQLTWTRLPQGFKNSPTIFDEALHRDLANFRIQHPQVTLLQYVDDLLLAGATKQDCLEGTKALLLELSDLGYRASAKKAQICRREVTYLGYSLRDGQRWLTEARKKTVVQIPAPTTAKQMREFLGTAGFCRLWIPGFAELAAPLYPLTKEKGEFSWAPEHQKAFDAIKKALLSAPALALPDVTKPFTLYVDERKGVARGVLTQTLGPWRRPVAYLSKKLDPVASGWPVCLKAIAAVAILVKDADKLTLGQNITVIAPHALENIVRQPPDRWMTNARMTHYQSLLLTERVTFAPPAALNPATLLPEETDEPVTHDCHQLLIEETGVRKDLTDIPLTGEVLTWFTDGSSYVVEGKRMAGAAVVDGTRTIWASSLPEGTSAQKAELMALTQALRLAEGKSINIYTDSRYAFATAHVHGAIYKQRGLLTSAGREIKNKEEILSLLEALHLPKRLAIIHCPGHQKAKDPISRGNQMADRVAKQAAQGVNLLPMIETPKAP

SEQ ID NO: 23 - DNA, 2061 bp, synthetic construct
  misc_feature 1..2061: note = Engineered reverse transcriptase variants
  source 1..2061: mol_type = other DNA
atgcatcaccatcaccatcatggtggtagcggagtgctgacccttcagctggatgatgaatatcgcttgtacagtccgctggtcaaaccagaccaaaacattcagttctggctcgaacagtttccgcaagcgtgggctgaaactgcaggcatgggcctggccaaacaggttcctcctcaggtaatccaattaaaggcatctgccacgccggtgtcagttcgtcagtatccgctgtcgaaagaagcgcaagaggggattcgcccacacgtgcagcgtttgatccagcagggcattctggtaccggttcaaagcccctggaataccccgcttttaccagtccgcaaaccgggtacaaacgattaccgtcctgtgcaagacctgcgcgaagtcaataaacgtgtgcaggatatccacccaaccgttccgaacccgtataatctgttgtgcgcgttaccgccgcagcgttcctggtacacggtgctggacctgaaggacgcgttcttctgtcttcgcctccaccccaccagccagccactgtttgcctttgaatggcgcgatcctgatacgggccgtactgggcaattaacatggacccgtttgccgcagggctttaagaacagtcccaccatttttgatgaggctcttcaccgcgacctcgcaaatttccgcatccaacacccacaggtaacgttactccagtatgtcgatgatcttttgttagcgggtgccaccaaacaggactgcttggaaggaacgaaagcacttctcttggaactctcggatttaggttatcgtgtgtccgccaagaaagctcagatttgtcgccgcgaagtgacatacttaggctattcattgcgtgatggtcaacgttggcttactgaggcgcgcaagaagaccgttgttcaaatccccgcccctaccaccgcgaaacagatgcgtgaatttcttggcacggcaggtttctgccgtttgtggattcctggctttgctaccttagcggcacccctctatccactcacgaaagagaaaggagaattctcttgggccccagaacatcagaaagcgtttgacgccatcaagaaagcgttattaagcgctcctgctcttgcattgcccgatgtcaccaaaccattcacgctctacgtggatgaacgcaaaggcgtagcccgcggtgtgttgacacagaccttaggaccttggcgtcgtcccgtggcctacctctcgaagaaacttgacccagttgcaagtggttggcctgtctgcttgaaagctattgccgcagttgcaatcctcgtcaaagatgccgacaaacttactttgggccagaacattactgttattgcaccacacgcccttgaaaacatcgttcgtcagccacctgatcgctggatgaccaatgctcgcatgacgcattatcagagcctcttgcttaccgaacgcgtgacttttgctccacctgcagccttaaaccccgcaacccttttacccgaagaaacagatgagcctgtgacgcatgactgtcaccagctcttgattgaagaaactggcgtacgcaaagacctcaccgatattccattaacaggtgaggtacttacgtggtttaccgatgggtcctcttatgtcgtcgaaggcaaacgtatggctggtgccgccgttgttgatggcacccgtactatctgggcaagcagcttacccgaaggcacgagtgctcagaaagcagagttgatggccttgacccaagccttacgccttgctgaagggaaatcgatcaatatttacaccgactcacgctatgcattcgccacggcacatgtacacggtgccatctacaaacaacgtggtttgttaacttctgctggccgcgagattaagaacaaagaagaaatcctttccttacttgaagccttacacctccccaaacgtctcgctattattcattgtccagggcatcagaaagcaaaagatcctatcagccgtgggaatcaaatggcagatcgtgtcgctaaacaggcagcccaaggcgttaacttgttgcccatgattgagacccctaaagctcca

SEQ ID NO: 24 - protein, 687 aa, synthetic construct
  REGION 1..687: note = Engineered reverse transcriptase variants
MHHHHHHGGSGVLTLQLDDEYRLYSPLVKPDQNIQFWLEQFPQAWAETAGMGLAKQVPPQVIQLKASATPVSVRQYPLSKEAQEGIRPHVQRLIQQGILVPVQSPWNTPLLPVRKPGTNDYRPVQDLREVNKRVQDIHPTVPNPYNLLCALPPQRSWYTVLDLKDAFFCLRLHPTSQPLFAFEWRDPDTGRTGQLTWTRLPQGFKNSPTIFDEALHRDLANFRIQHPQVTLLQYVDDLLLAGATKQDCLEGTKALLLELSDLGYRVSAKKAQICRREVTYLGYSLRDGQRWLTEARKKTVVQIPAPTTAKQMREFLGTAGFCRLWIPGFATLAAPLYPLTKEKGEFSWAPEHQKAFDAIKKALLSAPALALPDVTKPFTLYVDERKGVARGVLTQTLGPWRRPVAYLSKKLDPVASGWPVCLKAIAAVAILVKDADKLTLGQNITVIAPHALENIVRQPPDRWMTNARMTHYQSLLLTERVTFAPPAALNPATLLPEETDEPVTHDCHQLLIEETGVRKDLTDIPLTGEVLTWFTDGSSYVVEGKRMAGAAVVDGTRTIWASSLPEGTSAQKAELMALTQALRLAEGKSINIYTDSRYAFATAHVHGAIYKQRGLLTSAGREIKNKEEILSLLEALHLPKRLAIIHCPGHQKAKDPISRGNQMADRVAKQAAQGVNLLPMIETPKAP

SEQ ID NO: 25 - DNA, 2061 bp, synthetic construct
  misc_feature 1..2061: note = Engineered reverse transcriptase variants
  source 1..2061: mol_type = other DNA
atgcatcaccatcaccatcatggtggtagcggagtgctgacccttcagctggatgatgaatatcgcttgtacagtccgctggtcaaaccagaccaaaacattcagttctggctcgaacagtttccgcaagcgtgggctgaaactgcaggcatgggcctggccaaacaggttcctcctcaggtaatccaattaaaggcatctgccacgccggtgtcagttcgtcagtatccgctgtcgaaagaagcgcaagaggggattcgcccacacgtgcagcgtttgatccagcagggcattctggtaccggttcaaagcccctggaataccccgcttttaccagtccgcaaaccgggtacaaacgattaccgtcctgtgcaagacctgcgcgaagtcaataaacgtgtgcaggatatccacccaaccgttccgaacccgtataatctgttgtgcgcgttaccgccgcagcgttcctggtacacggtgctggacctgaaggacgcgttcttctgtcttcgtctccaccccaccagccagccactgtttgcctttgaatggcgcgatcctgatacgggccgtactgggcaattaacatggacccgtttgccgcagggctttaagaacagtcccaccatttttgatgaggctcttcaccgcgacctcgcaaatttccgcatccaacacccacaggtaacgttactccagtatgtcgatgatcttttgttagcgggtgccaccaaacaggactgcttggaaggaacgaaagcacttctcttggaactctcggatttaggttatcgtgtgtccgccaagaaagctcagatttgtcgccgcgaagtgacatacttaggctattcattgcgtgatggtcaacgttggcttactgaggcgcgcaagaagaccgttgttcaaatccccgcccctaccaccgcgaaacagatgcgtgaatttcttggcacggcaggtttctgccgtttgtggattcctggctttgctaccttagcggcacccctctatccactcacgaaagagaaaggagaattctcttgggccccagaacatcagaaagcgtttgacgccatcaagaaagcgttattaagcgctcctgctcttgcattgcccgatgtcaccaaaccattcacgctctacgtggatgaacgcaaaggcgtagcccgcggtgtgttgacacagaccttaggaccttggcgtcgtcccgtggcctacctctcgaagaaacttgacccagttgcaagtggttggcctgtctgcttgaaagctattgccgcagttgcaatcctcgtcaaagatgccgacaaacttactttgggccagaacattactgttattgcaccacacgcccttgaagcaatcgttcgtcagccacctgatcgctggatgaccaatgctcgcatgacgcattatcagagcctcttgcttaccgaacgcgtgacttttgctccacctgcagccttaaaccccgcaacccttttacccgaagaaacagatgagcctgtgacgcatgactgtctgcagctcttgattgaagaaactggcgtacgcaaagacctcaccgatattccattaacaggtgaggtacttacgtggtttaccgatgggtcctcttatgtcgtcgaaggcaaacgtatggctggtgccgccgttgttgatggcacccgtactatctgggcaagcagcttacccgaaggcacgagtgctcagaaagcagagttgatggccttgacccaagccttacgccttgctgaagggaaatcgatcaatatttacaccgactcacgctatgcattcgccacggcacatgtacacggtgccatctacaaacaacgtggtttgttaacttctgctggccgcgagattaagaacaaagaagaaatcctttccttacttgaagccttacacctccccaaacgtctcgctattattcattgtccagggcatcagaaagcaaaagatcctatcagccgtgggaatcagatggcagatcgtgtcgctaaacaggcagcccaaggcgttaacttgttgcccatgattgagacccctaaagctcca

SEQ ID NO: 26 - protein, 687 aa, synthetic construct
  REGION 1..687: note = Engineered reverse transcriptase variants
MHHHHHHGGSGVLTLQLDDEYRLYSPLVKPDQNIQFWLEQFPQAWAETAGMGLAKQVPPQVIQLKASATPVSVRQYPLSKEAQEGIRPHVQRLIQQGILVPVQSPWNTPLLPVRKPGTNDYRPVQDLREVNKRVQDIHPTVPNPYNLLCALPPQRSWYTVLDLKDAFFCLRLHPTSQPLFAFEWRDPDTGRTGQLTWTRLPQGFKNSPTIFDEALHRDLANFRIQHPQVTLLQYVDDLLLAGATKQDCLEGTKALLLELSDLGYRVSAKKAQICRREVTYLGYSLRDGQRWLTEARKKTVVQIPAPTTAKQMREFLGTAGFCRLWIPGFATLAAPLYPLTKEKGEFSWAPEHQKAFDAIKKALLSAPALALPDVTKPFTLYVDERKGVARGVLTQTLGPWRRPVAYLSKKLDPVASGWPVCLKAIAAVAILVKDADKLTLGQNITVIAPHALEAIVRQPPDRWMTNARMTHYQSLLLTERVTFAPPAALNPATLLPEETDEPVTHDCLQLLIEETGVRKDLTDIPLTGEVLTWFTDGSSYVVEGKRMAGAAVVDGTRTIWASSLPEGTSAQKAELMALTQALRLAEGKSINIYTDSRYAFATAHVHGAIYKQRGLLTSAGREIKNKEEILSLLEALHLPKRLAIIHCPGHQKAKDPISRGNQMADRVAKQAAQGVNLLPMIETPKAP

SEQ ID NO: 27 - DNA, 2061 bp, synthetic construct
  misc_feature 1..2061: note = Engineered reverse transcriptase variants
  source 1..2061: mol_type = other DNA
atgcatcaccatcaccatcatggtggtagcggagtgctgacccttcagctggatgatgaatatcgcttgtacagtccgctggtcaaaccagaccaaaacattcagttctggctcgaacagtttccgcaagcgtgggctgaaactgcaggcatgggcctggccaaacaggttcctcctcaggtaatccaattaaaggcatctgccacgccggtgtcagttcgtcagtatccgctgtcgaaagaagcgcaagaggggattcgcccacacgtgcagcgtttgatccagcagggcattctggtaccggttcaaagcccctggaataccccgcttttaccagtccgcaaaccgggtacaaacgattaccgtcctgtgcaagacctgcgcgaagtcaataaacgtgtgcaggatatccacccaaccgttccgaacccgtataatctgttgtgcgcgttaccgccgcagcgttcctggtacacggtgctggacctgaaggacgcgttcttctgtcttcgcctccaccccaccagccagccactgtttgcctttgaatggcgcgatcctgatacgggccgtactgggcaattaacatggacccgtttgccgcagggctttaagaacagtcccaccatttttgatgaggctcttcaccgcgacctcgcaaatttccgcatccaacacccacaggtaacgttactccagtatgtcgatgatcttttgttagcgggtgccaccaaacaggactgcttggaaggaacgaaagcacttctcttggaactctcggatttaggttatcgtgtgtccgccaagaaagctcagatttgtcgccgcgaagtgacatacttaggctattcattgcgtgatggtcaacgttggcttactgaggcgcgcaagaagaccgttgttcaaatccccgcccctaccaccgcgaaacagatgcgtgaatttcttggcacggcaggtttctgccgtttgtggattcctggctttgctaccttagcggcacccctctatccactcacgaaagagaaaggagaattctcttgggccccagaacatcagaaagcgtttgacgccatcaagaaagcgttattaagcgctcctgctcttgcattgcccgatgtcaccaaaccattcacgctctacgtggatgaacgcaaaggcgtagcccgcggtgtgttgacacagaccttaggaccttggcgtcgtcccgtggcctacctctcgaagaaacttgacccagttgcaagtggttggcctgtctgcttgaaagctattgccgcagttgcaatcctcgtcaaagatgccgacaaacttactttgggccagaacattactgttattgcaccacacgcccttgaaaacatcgttcgtcagccacctgatcgctggatgaccaatgctcgcatgacgcattatcagagcctcttgcttaccgaacgcgtgacttttgctccacctgcagccttaaaccccgcaacccttttacccgaagaaacagatgagcctgtgacgcatgactgtcaccagctcttgattgaagaaactggcgtacgcaaagacctcaccgatattccattaacaggtgaggtacttacgtggtttaccgaggggtcctcttatgtcgtcgaaggcaaacgtatggctggtgccgccgttgttgatggcacccgtactatctgggcaagcagcttacccgaaggcacgagtgctcagaaagcacaattgatggccttgacccaagccttacgccttgctgaagggaaatcgatcaatatttacaccgactcacgctatgcattcgccacggcacatgtacacggtgccatctacaaacaacgtggtttgttaacttctgctggccgcgagattaagaacaaagaagaaatcctttccttacttgaagccttacacctccccaaacgtctcgctattattcattgtccagggcatcagaaagcaaaagatcctatcagccgtgggaatcaaatggcagatcgtgtcgctaaacaggcagcccaaggcgttaacttgttgcccatgattgagacccctaaagctcca

SEQ ID NO: 28 - protein, 687 aa, synthetic construct
  REGION 1..687: note = Engineered reverse transcriptase variants
MHHHHHHGGSGVLTLQLDDEYRLYSPLVKPDQNIQFWLEQFPQAWAETAGMGLAKQVPPQVIQLKASATPVSVRQYPLSKEAQEGIRPHVQRLIQQGILVPVQSPWNTPLLPVRKPGTNDYRPVQDLREVNKRVQDIHPTVPNPYNLLCALPPQRSWYTVLDLKDAFFCLRLHPTSQPLFAFEWRDPDTGRTGQLTWTRLPQGFKNSPTIFDEALHRDLANFRIQHPQVTLLQYVDDLLLAGATKQDCLEGTKALLLELSDLGYRVSAKKAQICRREVTYLGYSLRDGQRWLTEARKKTVVQIPAPTTAKQMREFLGTAGFCRLWIPGFATLAAPLYPLTKEKGEFSWAPEHQKAFDAIKKALLSAPALALPDVTKPFTLYVDERKGVARGVLTQTLGPWRRPVAYLSKKLDPVASGWPVCLKAIAAVAILVKDADKLTLGQNITVIAPHALENIVRQPPDRWMTNARMTHYQSLLLTERVTFAPPAALNPATLLPEETDEPVTHDCHQLLIEETGVRKDLTDIPLTGEVLTWFTEGSSYVVEGKRMAGAAVVDGTRTIWASSLPEGTSAQKAQLMALTQALRLAEGKSINIYTDSRYAFATAHVHGAIYKQRGLLTSAGREIKNKEEILSLLEALHLPKRLAIIHCPGHQKAKDPISRGNQMADRVAKQAAQGVNLLPMIETPKAP

SEQ ID NO: 29 - DNA, 2061 bp, synthetic construct
  misc_feature 1..2061: note = Engineered reverse transcriptase variants
  source 1..2061: mol_type = other DNA
atgcatcaccatcaccatcatggtggtagcggagtgctgacccttcagctggatgatgaatatcgcttgtacagtccgctggtcaaaccagaccaaaacattcagttctggctcgaacagtttccgcaagcgtgggctgaaactgctggcatgggcctggccaaacaggttcctcctcaggtaatccagttaaaggcatctgccacgccggtgtcagttcgtcagtatccgctgtcgaaagaagcgcaagaggggattcgcccacacgtgcagcgtttgatccagcagggcattctggtaccggttcaaagcccctggaataccccgcttttaccagtccgtaaaccgggtacaaacgattaccgtcctgtgcaagacctgcgcgaagtcaataaacgtgtgcaggatatccacccaaccgttccgaacccgtataatctgttgtgcgcgttaccgccgcagcgttcctggtacacggtgctggacctgaaggacgcgttcttctgtcttcgcctccatcccaccagccagccactgtttgcctttgaatggcgcgatcctgatacgggccgtactgggcaattaacatggacccgtttgccgcagggctttaagaacagtcccaccatttttgatgaggctcttcaccgcgacctcgcaaatttccgcatccaacacccacaggtaacgttactccagtatgtcgatgatcttttgttagcgggtgccaccaaacaggactgcttggaaggaacgaaagcacttctcttggaactctcggatttaggttatcgtgtgtccgccaagaaagctcagatttgtcgccgcgaagtgacatacttaggctattcattgcgtgatggtcaacgttggcttactgaggcgcgcaagaagaccgttgttcaaatccccgcccctacgaccccgaaacagatgcgtgaatttcttggcacggcaggtttctgccgtttgtggattcctggctttgctaccttagcggcacccctctatccactcacgaaagagaaaggagaattctcttgggccccagaacatcagaaagcgtttgacgccatcaagaaagcgttattaagcgctcctgctcttgcattgcccgatgtcaccaaaccattcacgctctacgtggatgaacgcaaaggcgtagcccgcggtgtgttgacacagaccttaggaccttggcgtcgtcccgtggcctacctctcgaagaaacttgacccagttgcaagtggttggcctgtctgcttgaaagctattgccgcagttgcaatcctcgtcaaagatgccgacaaacttactttgggccagaacattactgttattgcaccacacgcccttgaaaacatcgttcgtcagccacctgatcgctggatgaccaatgctcgcatgacgcattatcagagcctcttgcttaccgaacgcgtgacttttgctccacctgcagccttaaaccccgcaacccttttacccgaagaaacagatgagcctgtgacgcatgactgtcaccagctcttgattgaagaaactggcgtacgcaaagacctcaccgatattccattaacaggtgaggtacttacgtggtttaccgacgggtcctcttatgtcgtcgaaggcaaacgtatggctggtgccgccgttgttgatggcacccgtactatctgggcaagcagcttacccgaaggcacgagtgctcagaaagcagagttgatggccttgacccaagccttacgccttgctgaagggaaatcgatcaatatttacaccgactcacgctatgcattcgccacggcacatgtacacggtgccatctacaaacaacgtggtttgttaacttctgctggccgcgagattaagaacaaagaagaaatcctttccttacttgaagccttacacctccccaaacgtctcgctattattcattgtccagggcatcagaaagcaaaagatcctatcagccgtgggaatcaaatggcagatcgtgtcgctaaacaggcagcccaaggcgttaacttgttgcccatgattgagacccctaaagctcca

SEQ ID NO: 30 - protein, 687 aa, synthetic construct
  REGION 1..687: note = Engineered reverse transcriptase variants
MHHHHHHGGSGVLTLQLDDEYRLYSPLVKPDQNIQFWLEQFPQAWAETAGMGLAKQVPPQVIQLKASATPVSVRQYPLSKEAQEGIRPHVQRLIQQGILVPVQSPWNTPLLPVRKPGTNDYRPVQDLREVNKRVQDIHPTVPNPYNLLCALPPQRSWYTVLDLKDAFFCLRLHPTSQPLFAFEWRDPDTGRTGQLTWTRLPQGFKNSPTIFDEALHRDLANFRIQHPQVTLLQYVDDLLLAGATKQDCLEGTKALLLELSDLGYRVSAKKAQICRREVTYLGYSLRDGQRWLTEARKKTVVQIPAPTTPKQMREFLGTAGFCRLWIPGFATLAAPLYPLTKEKGEFSWAPEHQKAFDAIKKALLSAPALALPDVTKPFTLYVDERKGVARGVLTQTLGPWRRPVAYLSKKLDPVASGWPVCLKAIAAVAILVKDADKLTLGQNITVIAPHALENIVRQPPDRWMTNARMTHYQSLLLTERVTFAPPAALNPATLLPEETDEPVTHDCHQLLIEETGVRKDLTDIPLTGEVLTWFTDGSSYVVEGKRMAGAAVVDGTRTIWASSLPEGTSAQKAELMALTQALRLAEGKSINIYTDSRYAFATAHVHGAIYKQRGLLTSAGREIKNKEEILSLLEALHLPKRLAIIHCPGHQKAKDPISRGNQMADRVAKQAAQGVNLLPMIETPKAP

SEQ ID NO: 31 - DNA, 2061 bp, synthetic construct
  misc_feature 1..2061: note = Engineered reverse transcriptase variants
  source 1..2061: mol_type = other DNA
atgcatcaccatcaccatcatggtggtagcggagtgctgacccttcagctggatgatgaatatcgcttgtacagtccgctggtcaaaccagaccaaaacattcagttctggctcgaacagtttccgcaagcgtgggctgaaactggtggcatgggcctggccaaacaggttcctcctcaggtaatccagttaaaggcatctgccacgccggtgtcagttcgtcagtatccgctgtcgaaagaagcgcaagaggggattcgcccacacgtgcagcgtttgatccagcagggcattctggtaccggttcaaagcccctggaataccccgcttttaccagtccgcaaaccgggtacaaacgattaccgtcctgtgcaagacctgcgcgaagtcaataaacgtgtgcaggatatccacccaaccgttccgaacccgtataatctgttgtgcgcgttaccgccgcagcgttcctggtacacggtgctggacctgaaggacgcgttcttctgtcttcgcctcgcacccaccagccagccactgtttgcctttgaatggcgcgatcctgatacgggccgtactgggcaattaacatggacccgtttgccgcagggctttaagaacagtcccaccatttttgatgaggctcttcaccgcgacctcgcaaatttccgcatccaacacccacaggtaacgttactccagtatgtcgatgatcttttgttagcgggtgccaccaaacaggactgcttggaaggaacgaaagcacttctcttggaactctcggatttaggttatcgtgtgtccgccaagaaagctcagatttgtcgccgcgaagtgacatacttaggctattcattgcgtgatggtcaacgttggcttactgaggcgcgcaagaagaccgttgttcaaatccccgcccctacgaccccgaaacagatgcgtgaatttcttggcacggcaggtttctgccgtttgtggattcctggctttgctgaattagcggcacccctctatccactcacgaaagagaaaggagaattctcttgggccccagaacatcagaaagcgtttgacgccatcaagaaagcgttattaagcgctcctgctcttgcattgcccgatgtcaccaaaccattcacgctctacgtggatgaacgcaaaggcgtagcccgcggtgtgttgacacagaccttaggaccttggcgtcgtcccgtggcctacctctcgaagaaacttgacccagttgcaagtggttggcctgtctgcttgaaagctattgccgcagttgcaatcctcgtcaaagatgccgacaaacttactttgggccagaacattactgttattgcaccacacgcccttgaaaacatcgttcgtcagccacctgatcgctggatgaccaatgctcgcatgacgcattatcagagcctcttgcttaccgaacgcgtgacttttgctccacctgcagccttaaaccccgcaacccttttacccgaagaaacagatgagcctgtgacgcatgactgtcaccagctcttgattgaagaaactggcgtacgcaaagacctcaccgatattccattaacaggtgaggtacttacgtggtttaccgacgggtcctcttatgtcgtcgaaggcaaacgtatggctggtgccgccgttgttgatggcacccgtactatctgggcaagcagcttacccgaaggcacgagtgctcagaaagcagaattgatggccttgacccaagccttacgccttgctgaagggaaatcgatcaatatttacaccgactcacgctatgcattcgccacggcacatgtacacggtgccatctacaaacaacgtggtttgttaacttctgctggccgcgagattaagaacaaagaagaaatcctttccttacttgaagccttacacctccccaaacgtctcgctattattcattgtccagggcatcagaaagcaaaagatcctatcagccgtgggaatcaaatggcagatcgtgtcgctaaacaggcagcccaaggcgttaacttgttgcccatgattgagacccctaaagctcca

SEQ ID NO: 32 - protein, 687 aa, synthetic construct
  REGION 1..687: note = Engineered reverse transcriptase variants
MHHHHHHGGSGVLTLQLDDEYRLYSPLVKPDQNIQFWLEQFPQAWAETGGMGLAKQVPPQVIQLKASATPVSVRQYPLSKEAQEGIRPHVQRLIQQGILVPVQSPWNTPLLPVRKPGTNDYRPVQDLREVNKRVQDIHPTVPNPYNLLCALPPQRSWYTVLDLKDAFFCLRLAPTSQPLFAFEWRDPDTGRTGQLTWTRLPQGFKNSPTIFDEALHRDLANFRIQHPQVTLLQYVDDLLLAGATKQDCLEGTKALLLELSDLGYRVSAKKAQICRREVTYLGYSLRDGQRWLTEARKKTVVQIPAPTTPKQMREFLGTAGFCRLWIPGFAELAAPLYPLTKEKGEFSWAPEHQKAFDAIKKALLSAPALALPDVTKPFTLYVDERKGVARGVLTQTLGPWRRPVAYLSKKLDPVASGWPVCLKAIAAVAILVKDADKLTLGQNITVIAPHALENIVRQPPDRWMTNARMTHYQSLLLTERVTFAPPAALNPATLLPEETDEPVTHDCHQLLIEETGVRKDLTDIPLTGEVLTWFTDGSSYVVEGKRMAGAAVVDGTRTIWASSLPEGTSAQKAELMALTQALRLAEGKSINIYTDSRYAFATAHVHGAIYKQRGLLTSAGREIKNKEEILSLLEALHLPKRLAIIHCPGHQKAKDPISRGNQMADRVAKQAAQGVNLLPMIETPKAP

SEQ ID NO: 33 - DNA, 2061 bp, synthetic construct
  misc_feature 1..2061: note = Engineered reverse transcriptase variants
  source 1..2061: mol_type = other DNA
atgcatcaccatcaccatcatggtggtagcggagtgctgacccttcagctggatgatgaatatcgcttgtacagtccgctggtcaaaccagaccaaaacattcagttctggctcgaacagtttccgcaagcgtgggctgaaactgcaggcatgggcctggccaaacaggttcctcctcaggtaatccaattaaaggcatctgccacgccggtgtcagttcgtcagtatccgctgtcgaaagaagcgcaagaggggattcgcccacacattcagcgtttgatccagcagggcattctggtaccggttcaaagcccctggaataccccgcttttaccagtccgcaaaccgggtacaaacgattaccgtcctgtgcaagacctgcgcgaagtcaataaacgtgtgcaggatatccacccaaccgttccgaacccgtataatctgttgtgcgcgttaccgccgcagcgttcctggtacacggtgctggacctgaaggacgcgttcttctgtcttcgcctccaccccaccagccagccactgtttgcctttgaatggcgcgatcctgatacgggccgtactgggcaattaacatggacccgtttgccgcagggctttaagaacagtcccaccatttttgatgaggctcttcaccgcgacctcgcaaatttccgcatccaacacccacaggtaacgttactccagtatgtcgatgatcttttgttagcgggtgccaccaaacaggactgcttggaaggaacgaaagcacttctcttggaactctcggatttaggttatcgtgtgtccgccaagaaagctcagatttgtcgccgcgaagtgacatacttaggctattcattgcgtgatggtcaacgttggcttactgaggcgcgcaagaagaccgttgttcaaatccccgcccctaccaccgcgaaacagatgcgtgaatttcttggcacggcaggtttctgccgtttgtggattcctggctttgctgaattagcggcacccctctatccactcacgaaagagaaaggagaattctcttgggccccagaacatcagaaagcgtttgacgccatcaagaaagcgttattaagcgctcctgctcttgcattgcccgatgtcaccaaaccattcacgctctacgtggatgaacgcaaaggcgtagcccgcggtgtgttgacacagaccttaggaccttggcgtcgtcccgtggcctacctctcgaagaaacttgacccagttgcaagtggttggcctgtctgcttgaaagctattgccgcagttgcaatcctcgtcaaagatgccgacaaacttactttgggccagaacattactgttattgcaccacacgcccttgaaaacatcgttcgtcagccacctgatcgctggatgaccaatgctcgcatgacgcattatcagagcctcttgcttaccgaacgcgtgacttttgctccacctgcagccttaaaccccgcaacccttttacccgaagaaacagatgagcctgtgacgcatgactgtcaccagctcttgattgaagaaactggcgtacgcaaagacctcaccgatattccattaacaggtgaggtacttacgtggtttaccgatgggtcctcttatgtcgtcgaaggcaaacgtatggctggtgccgccgttgttgatggcacccgtactatctgggcaagcagcttacccgaaggcacgagtgctcagaaagcagagttgatggccttgacccaagccttacgccttgctgaagggaaatcgatcaatatttacaccgactcacgctatgcattcgccacggcacatgtacacggtgccatctacaaacaacgtggtttgttaacttctgctggccgcgagattaagaacaaagaagaaatcctttccttacttgaagccttacacctccccaaacgtctcgctattattcattgtccagggcatcagaaagcaaaagatcctatcagccgtgggaatcaaatggcagatcgtgtcgctaaacaggcagcccaaggcgttaacttgttgcccatgattgagacccctaaagctcca

SEQ ID NO: 34 - protein, 687 aa, synthetic construct
  REGION 1..687: note = Engineered reverse transcriptase variants
MHHHHHHGGSGVLTLQLDDEYRLYSPLVKPDQNIQFWLEQFPQAWAETAGMGLAKQVPPQVIQLKASATPVSVRQYPLSKEAQEGIRPHIQRLIQQGILVPVQSPWNTPLLPVRKPGTNDYRPVQDLREVNKRVQDIHPTVPNPYNLLCALPPQRSWYTVLDLKDAFFCLRLHPTSQPLFAFEWRDPDTGRTGQLTWTRLPQGFKNSPTIFDEALHRDLANFRIQHPQVTLLQYVDDLLLAGATKQDCLEGTKALLLELSDLGYRVSAKKAQICRREVTYLGYSLRDGQRWLTEARKKTVVQIPAPTTAKQMREFLGTAGFCRLWIPGFAELAAPLYPLTKEKGEFSWAPEHQKAFDAIKKALLSAPALALPDVTKPFTLYVDERKGVARGVLTQTLGPWRRPVAYLSKKLDPVASGWPVCLKAIAAVAILVKDADKLTLGQNITVIAPHALENIVRQPPDRWMTNARMTHYQSLLLTERVTFAPPAALNPATLLPEETDEPVTHDCHQLLIEETGVRKDLTDIPLTGEVLTWFTDGSSYVVEGKRMAGAAVVDGTRTIWASSLPEGTSAQKAELMALTQALRLAEGKSINIYTDSRYAFATAHVHGAIYKQRGLLTSAGREIKNKEEILSLLEALHLPKRLAIIHCPGHQKAKDPISRGNQMADRVAKQAAQGVNLLPMIETPKAP

SEQ ID NO: 35 - DNA, 2061 bp, synthetic construct
  misc_feature 1..2061: note = Engineered reverse transcriptase variants
  source 1..2061: mol_type = other DNA
atgcatcaccatcaccatcatggtggtagcggagtgctgacccttcagctggatgatgaatatcgcttgtacagtccgctggtcaaaccagaccaaaacattcagttctggctcgaacagtttccgcaagcgtgggctgaaactgctggcatgggcctggccaaacaggttcctcctcaggtaatcctgttaaaggcatctgccacgccggtgtcagttcgtcagtatccgctgtcgaaagaagcgcaagaggggattcgcccacacattcagcgtttgatccagcagggcattctggtaccggttcaaagcccctggaataccccgcttttaccagtccgtaaaccgggtacaaacgattaccgtcctgtgcaagacctgcgcgaagtcaataaacgtgtgcaggatatccacccaaccgttccgaacccgtataatctgttgtgcgcgttaccgccgcagcgttcctggtacacggtgctggacctgaaggacgcgttcttctgtcttcgcctccatcccaccagccagccactgtttgcctttgaatggcgcgatcctgatacgggccgtactgggcaattaacatggacccgtttgccgcagggctttaagaacagtcccaccatttttgatgaggctcttcatcgcgacctcgcaaatttccgcatccaacacccacaggtaacgttactccagtatgtcgatgatcttttgttagcgggtgccaccaaacaggactgcttggaaggaacgaaagcacttctcttggaactctcggatttaggttatcgtgtgtccgccaagaaagctcagatttgtcgccgcgaagtgacatacttaggctattcattgcgtgatggtcaacgttggcttactgaggcgcgcaagaagaccgttgttcaaatccccgcccctacgaccccgaaacagatgcgtgaatttcttggcacggcaggtttttgccgtttgtggattcctggctttgctacgttagcggcacccctctatccactcacgaaagagaaaggagaattctcttgggccccagaacatcagaaagcgtttgacgccatcaagaaagcgttattaagcgctcctgctcttgcattgcccgatgtcaccaaaccattcacgctctacgtggatgaacgcaaaggcgtagcccgcggtgtgttgacacagaccttaggaccttggcgtcgtcccgtggcctacctctcgaagaaacttgacccagttgcaagtggttggcctgtctgcttgaaagctattgccgcagttgcaatcctcgtcaaagatgccgacaaacttactttgggccagaacattactgttattgcaccacacgcccttgaaaacatcgttcgtcagccacctgatcgctggatgaccaatgctcgcatgacgcattatcagagcctcttgcttaccgaacgcgtgacttttgctccacctgcagccttaaaccccgcaacccttttacccgaagaaacagatgagcctgtgacgcatgactgtcaccagctcttgattgaagaaactggcgtacgcaaagacctcaccgatattccattaacaggtgaggtacttacgtggtttaccgatgggtcctcttatgtcgtcgaaggcaaacgtatggctggtgccgccgttgttgatggcacccgtactatctgggcaagcagcttacccgaaggcacgagtgctcagaaagcagatttgatggccttgacccaagccttacgccttgctgaagggaaatcgatcaatatttacaccgactcacgctatgcattcgccacggcacatgtacacggtgccatctacaaacaacgtggtttgttaacttctgctggccgcgagattaagaacaaagaagaaatcctttccttacttgaagccttacacctccccaaacgtctcgctattattcattgtccagggggtcagaaagcaaaagatcctatcagccgtgggaatcaaatggcagatcgtgtcgctaaacaggcagcccaaggcgttaacttgttgcccatgattgagacccctaaagctcca

SEQ ID NO: 36 - protein, 687 aa, synthetic construct
  REGION 1..687: note = Engineered reverse transcriptase variants
MHHHHHHGGSGVLTLQLDDEYRLYSPLVKPDQNIQFWLEQFPQAWAETAGMGLAKQVPPQVILLKASATPVSVRQYPLSKEAQEGIRPHIQRLIQQGILVPVQSPWNTPLLPVRKPGTNDYRPVQDLREVNKRVQDIHPTVPNPYNLLCALPPQRSWYTVLDLKDAFFCLRLHPTSQPLFAFEWRDPDTGRTGQLTWTRLPQGFKNSPTIFDEALHRDLANFRIQHPQVTLLQYVDDLLLAGATKQDCLEGTKALLLELSDLGYRVSAKKAQICRREVTYLGYSLRDGQRWLTEARKKTVVQIPAPTTPKQMREFLGTAGFCRLWIPGFATLAAPLYPLTKEKGEFSWAPEHQKAFDAIKKALLSAPALALPDVTKPFTLYVDERKGVARGVLTQTLGPWRRPVAYLSKKLDPVASGWPVCLKAIAAVAILVKDADKLTLGQNITVIAPHALENIVRQPPDRWMTNARMTHYQSLLLTERVTFAPPAALNPATLLPEETDEPVTHDCHQLLIEETGVRKDLTDIPLTGEVLTWFTDGSSYVVEGKRMAGAAVVDGTRTIWASSLPEGTSAQKADLMALTQALRLAEGKSINIYTDSRYAFATAHVHGAIYKQRGLLTSAGREIKNKEEILSLLEALHLPKRLAIIHCPGGQKAKDPISRGNQMADRVAKQAAQGVNLLPMIETPKAP

SEQ ID NO: 37 - DNA, 2061 bp, synthetic construct
  misc_feature 1..2061: note = Engineered reverse transcriptase variants
  source 1..2061: mol_type = other DNA
atgcatcaccatcaccatcatggtggtagcggagtgctgacccttcagctggatgatgaatatcgcttgtacagtccgctggtcaaaccagaccaaaacattcagttctggctcgaacagtttccgcaagcgtgggctgaaactgctggcatgggcctggccaaacaggttcctcctcaggtaatccaattaaaggcatctgccacgccggtgtcagttcgtcagtatccgctgtcgaaagaagcgcaagaggggattcgcccacacattcagcgtttgatccagcagggcattctggtaccggttcaaagcccctggaataccccgcttttaccagtccgtaaaccgggtacaaacgattaccgtcctgtgcaagacctgcgcgaagtcaataaacgtgtgcaggatatccacccaaccgttccgaacccgtataatctgttgtgcgcgttaccgccgcagcgttcctggtacacggtgctggacctgaaggacgcgttcttctgtcttcgcctcgcacccaccagccagccactgtttgcctttgaatggcgcgatcctgatacgggccgtactgggcaattaacatggacccgtttgccgcagggctttaagaacagtcccgcgctgtttgatgaggctcttcaccgcgacctcgcaaatttccgcatccaacacccacaggtaacgttactccagtatgtcgatgatcttttgttagcgggtgccaccaaacaggactgcttggaaggaacgaaagcacttctcttggaactctcggatttaggttatcgtgtgtccgccaagaaagctcagatttgtcgccgcgaagtgacatacttaggctattcattgcgtgatggtcaacgttggcttactgaggcgcgcaagaagaccgttgttcaaatccccgcccctacgaccgcgaaacagatgcgtgaatttcttggcacggcaggtgcgtgccgtttgtggattcctggctttgctacgttagcggcacccctctatccactcacgaaagagaaaggagaattctcttgggccccagaacatcagaaagcgtttgacgccatcaagaaagcgttattaagcgctcctgctcttgcattgcccgatgtcaccaaaccattcacgctctacgtggatgaacgcaaaggcgtagcccgcggtgtgttgacacagaccttaggaccttggcgtcgtcccgtggcctacctctcgaagaaacttgacccagttgcaagtggttggcctgtctgcttgaaagctattgccgcagttgcaatcctcgtcaaagatgccgacaaacttactttgggccagaacattactgttattgcaccacacgcccttgaaaacatcgttcgtcagccacctgatcgctggatgaccaatgctcgcatgacgcattatcagagcctcttgcttaccgaacgcgtgacttttgctccacctgcagccttaaaccccgcaacccttttacccgaagaaacagatgagcctgtgacgcatgactgtcaccagctcttgattgaagaaactggcgtacgcaaagacctcaccgatattccattaacaggtgaggtacttacgtggtttaccgacgggtcctcttatgtcgtcgaaggcaaacgtatggctggtgccgccgttgttgatggcacccgtactatctgggcaagcagcttacccgaaggcacgagtgctcagaaagcagatttgatggccttgacccaagccttacgccttgctgaagggaaatcgatcaatatttacaccgactcacgcagcgcattcgccacggcacatgtacacggtgccatctacaaacaacgtggtttgttaacttctgctggccgcgagattaagaacaaagaagaaatcctttccttacttgaagccttacacctccccaaacgtctcgctattattcattgtccagggcatcagaaagcaaaagatcctatcagccgtgggaatcaaatggcagatcgtgtcgctaaacaggcagcccaaggcgttaacttgttgcccatgattgagacccctaaagctcca

SEQ ID NO: 38 - protein, 687 aa, synthetic construct
  REGION 1..687: note = Engineered reverse transcriptase variants
MHHHHHHGGSGVLTLQLDDEYRLYSPLVKPDQNIQFWLEQFPQAWAETAGMGLAKQVPPQVIQLKASATPVSVRQYPLSKEAQEGIRPHIQRLIQQGILVPVQSPWNTPLLPVRKPGTNDYRPVQDLREVNKRVQDIHPTVPNPYNLLCALPPQRSWYTVLDLKDAFFCLRLAPTSQPLFAFEWRDPDTGRTGQLTWTRLPQGFKNSPALFDEALHRDLANFRIQHPQVTLLQYVDDLLLAGATKQDCLEGTKALLLELSDLGYRVSAKKAQICRREVTYLGYSLRDGQRWLTEARKKTVVQIPAPTTAKQMREFLGTAGACRLWIPGFATLAAPLYPLTKEKGEFSWAPEHQKAFDAIKKALLSAPALALPDVTKPFTLYVDERKGVARGVLTQTLGPWRRPVAYLSKKLDPVASGWPVCLKAIAAVAILVKDADKLTLGQNITVIAPHALENIVRQPPDRWMTNARMTHYQSLLLTERVTFAPPAALNPATLLPEETDEPVTHDCHQLLIEETGVRKDLTDIPLTGEVLTWFTDGSSYVVEGKRMAGAAVVDGTRTIWASSLPEGTSAQKADLMALTQALRLAEGKSINIYTDSRSAFATAHVHGAIYKQRGLLTSAGREIKNKEEILSLLEALHLPKRLAIIHCPGHQKAKDPISRGNQMADRVAKQAAQGVNLLPMIETPKAP

SEQ ID NO: 39 - DNA, 2061 bp, synthetic construct
  misc_feature 1..2061: note = Engineered reverse transcriptase variants
  source 1..2061: mol_type = other DNA
atgcatcaccatcaccatcatggtggtagcggagtgctgacccttcagctggatgatgaatatcgcttgtacagtccgctggtcaaaccagaccaaaacattcagttctggctcgaacagtttccgcaagcgtgggctgaaactgctggcatgggcctggccaaacaggttcctcctcaggtaatccaattaaaggcatctgccacgccggtgtcagttcgtcagtatccgctgtcgaaagaagcgcaagaggggattcgcccacacgtgcagcgtttgatccagcagggcattctggtaccggttcaaagcccctggaataccccgcttttaccagtccgcaaaccgggtacaaacgattaccgtcctgtgcaagacctgcgcgaagtcaataaacgtgtgcaggatatccacccaaccgttccgaacccgtataatctgttgtgcgcgttaccgccgcagcgttcctggtacacggtgctggacctgaaggacgcgttcttctgtcttcgcctccaccccaccagccagccactgtttgcctttgaatggcgcgatcctgatacgggccgtactgggcaattaacatggacccgtttgccgcagggctttaagaacagtcccaccatttttgatgaggctcttcaccgcgacctcgcaaatttccgcatccaacacccacaggtaacgttactccagtatgtcgatgatcttttgttagcgggtgccaccaaacaggactgcttggaaggaacgaaagcacttctcttggaactctcggatttaggttatcgtgtgtccgccaagaaagctcagatttgtcgccgcgaagtgacatacttaggctattcattgcgtgatggtcaacgttggcttactgaggcgcgcaagaagaccgttgttcaaatccccgcccctaccaccgcgaagcagatgcgtgaatttcttggcacggcaggtttctgccgtttgtggattcctggctttgctaccttagcggcacccctctatccactcacgaaagagaaaggagaattctcttgggccccagaacatcagaaagcgtttgacgccatcaagaaagcgttattaagcgctcctgctcttgcattgcccgatgtgaccaaaccattcacgctctacgtggatgaacgcaaaggcgtagcccgcggtgtgttgacacagaccttaggaccttggcgtcgtcccgtggcctacctctcgaagaaacttgacccagttgcaagtggttggcctgtctgcttgaaagctattgccgcagttgcaatcctcgtcaaagatgccgacaaacttactttgggccagaacatcactgttattgcaccacacgcccttgaaaacatcgttcgtcagccacctgatcgctggatgaccaatgctcgcatgacgcattatcagagcctcttgcttaccgagcgcgtgacttttgctccacctgcagccttaaaccccgcaacccttttacccgaagaaacagatgagcctgtgacgcatgactgtctgcagctcttgattgaagaaactggcgtacgcccggacctcaccgatattccattaacaggtgaggtacttacgtggtttaccgatgggtcctcttatgtcgtcgaaggcaaacgtatggctggtgccgccgttgttgatggcacccgtactatctgggcaagcagcttacccgaaggcacgagtgctcagaaagcagagttgatggccttgacccaagccttacgccttgctgaagggaaatcgatcaatatttacaccgactcacgctatgcattcgccacggcacatgtacacggtgccatctacaaacaacgtggtttgttaacttctgctggccgcgagattaagaacaaagaagaaatcctttccttacttgaagccttacacctccccaaacgtctcgctattattcattgtccagggcatcagaaagcaaaagatcctatcagccgtgggaatcagatggcagatcgtgtcgctaaacaggcagcccaaggcgttaacttgttgcccatgattgagacccctaaagctcca

SEQ ID NO: 40 - protein, 687 aa, synthetic construct
  REGION 1..687: note = Engineered reverse transcriptase variants
MHHHHHHGGSGVLTLQLDDEYRLYSPLVKPDQNIQFWLEQFPQAWAETAGMGLAKQVPPQVIQLKASATPVSVRQYPLSKEAQEGIRPHVQRLIQQGILVPVQSPWNTPLLPVRKPGTNDYRPVQDLREVNKRVQDIHPTVPNPYNLLCALPPQRSWYTVLDLKDAFFCLRLHPTSQPLFAFEWRDPDTGRTGQLTWTRLPQGFKNSPTIFDEALHRDLANFRIQHPQVTLLQYVDDLLLAGATKQDCLEGTKALLLELSDLGYRVSAKKAQICRREVTYLGYSLRDGQRWLTEARKKTVVQIPAPTTAKQMREFLGTAGFCRLWIPGFATLAAPLYPLTKEKGEFSWAPEHQKAFDAIKKALLSAPALALPDVTKPFTLYVDERKGVARGVLTQTLGPWRRPVAYLSKKLDPVASGWPVCLKAIAAVAILVKDADKLTLGQNITVIAPHALENIVRQPPDRWMTNARMTHYQSLLLTERVTFAPPAALNPATLLPEETDEPVTHDCLQLLIEETGVRPDLTDIPLTGEVLTWFTDGSSYVVEGKRMAGAAVVDGTRTIWASSLPEGTSAQKAELMALTQALRLAEGKSINIYTDSRYAFATAHVHGAIYKQRGLLTSAGREIKNKEEILSLLEALHLPKRLAIIHCPGHQKAKDPISRGNQMADRVAKQAAQGVNLLPMIETPKAP

SEQ ID NO: 41 - DNA, 2061 bp, synthetic construct
  misc_feature 1..2061: note = Engineered reverse transcriptase variants
  source 1..2061: mol_type = other DNA
atgcatcaccatcaccatcatggtggtagcggagtgctgacccttcagctggatgatgaatatcgcttgtacagtccgctggtcaaaccagaccaaaacattcagttctggctcgaacagtttccgcaagcgtgggctgaaactggtggcatgggcctggccaaacaggttcctcctcaggtaatcctgttaaaggcatctgccacgccggtgtcagttcgtcagtatccgctgtcgaaagaagcgcaagaggggattcgcccacacattcagcgtttgatccagcagggcattctggtaccggttcaaagcccctggaataccccgcttttaccagtccgtaaaccgggtacaaacgattaccgtcctgtgcaagacctgcgcgaagtcaataaacgtgtgcaggatatccacccaaccgttccgaacccgtataatctgttgtgcgcgttaccgccgcagcgttcctggtacacggtgctggacctgaaggacgcgttcttctgtcttcgcctccatcccaccagccagccactgtttgcctttgaatggcgcgatcctgatacgggccgtactgggcaattaacatggacccgtttgccgcagggctttaagaacagtcccaccatttttgatgaggctcttcgtcgcgacctcgcaaatttccgcatccaacacccacaggtaacgttactccagtatgtcgatgatcttttgttagcgggtgccaccaaacaggactgcttggaaggaacgaaagcacttctcttggaactctcggatttaggttatcgtgtgtccgccaagaaagctcagatttgtcgccgcgaagtgacatacttaggctattcattgcgtgatggtcaacgttggcttactgaggcgcgcaagaagaccgttgttcaaatccccgcccctacgaccccgaaacagatgcgtgaatttcttggcacggcaggtgcgtgccgtttgtggattcctggctttgctaccttagcggcacccctctatccactcacgaaagagaaaggagaattctcttgggccccagaacatcagaaagcgtttgacgccatcaagaaagcgttattaagcgctcctgctcttgcattgcccgatgtcaccaaaccattcacgctctacgtggatgaacgcaaaggcgtagcccgcggtgtgttgacacagaccttaggaccttggcgtcgtcccgtggcctacctctcgaagaaacttgacccagttgcaagtggttggcctgtctgcttgaaagctattgccgcagttgcaatcctcgtcaaagatgccgacaaacttactttgggccagaacattactgttattgcaccacacgcccttgaaaacatcgttcgtcagccacctgatcgctggatgaccaatgctcgcatgacgcattatcagagcctcttgcttaccgaacgcgtgacttttgctccacctgcagccttaaaccccgcaacccttttacccgaagaaacagatgagcctgtgacgcatgactgtcaccagctcttgattgaagaaactggcgtacgcaaagacctcaccgatattccattaacaggtgaggtacttacgtggtttaccgaggggtcctcttatgtcgtcgaaggcaaacgtatggctggtgccgccgttgttgatggcacccgtactatctgggcaagcagcttacccgaaggcacgagtgctcagaaagcagatttgatggccttgacccaagccttacgccttgctgaagggaaatcgatcaatatttacaccgactcacgctatgcattcgccacggcacatgtacacggtgccatctacaaacaacgtggtttgttaacttctgctggccgcgagattaagaacaaagaagaaatcctttccttacttgaagccttacacctccccaaacgtctcgctattattcattgtccagggcatcagaaagcaaaagatcctatcagccgtgggaatcaaatggcagatcgtgtcgctaaacaggcagcccaaggcgttaacttgttgcccatgattgagacccctaaagctcca

SEQ ID NO: 42 - protein, 687 aa, synthetic construct
  REGION 1..687: note = Engineered reverse transcriptase variants
MHHHHHHGGSGVLTLQLDDEYRLYSPLVKPDQNIQFWLEQFPQAWAETGGMGLAKQVPPQVILLKASATPVSVRQYPLSKEAQEGIRPHIQRLIQQGILVPVQSPWNTPLLPVRKPGTNDYRPVQDLREVNKRVQDIHPTVPNPYNLLCALPPQRSWYTVLDLKDAFFCLRLHPTSQPLFAFEWRDPDTGRTGQLTWTRLPQGFKNSPTIFDEALRRDLANFRIQHPQVTLLQYVDDLLLAGATKQDCLEGTKALLLELSDLGYRVSAKKAQICRREVTYLGYSLRDGQRWLTEARKKTVVQIPAPTTPKQMREFLGTAGACRLWIPGFATLAAPLYPLTKEKGEFSWAPEHQKAFDAIKKALLSAPALALPDVTKPFTLYVDERKGVARGVLTQTLGPWRRPVAYLSKKLDPVASGWPVCLKAIAAVAILVKDADKLTLGQNITVIAPHALENIVRQPPDRWMTNARMTHYQSLLLTERVTFAPPAALNPATLLPEETDEPVTHDCHQLLIEETGVRKDLTDIPLTGEVLTWFTEGSSYVVEGKRMAGAAVVDGTRTIWASSLPEGTSAQKADLMALTQALRLAEGKSINIYTDSRYAFATAHVHGAIYKQRGLLTSAGREIKNKEEILSLLEALHLPKRLAIIHCPGHQKAKDPISRGNQMADRVAKQAAQGVNLLPMIETPKAP

SEQ ID NO: 43 - DNA, 2061 bp, synthetic construct
  misc_feature 1..2061: note = Engineered reverse transcriptase variants
  source 1..2061: mol_type = other DNA
atgcatcaccatcaccatcatggtggtagcggagtgctgacccttcagctggatgatgaatatcgcttgtacagtccgctggtcaaaccagaccaaaacattcagttctggctcgaacagtttccgcaagcgtgggctgaaactggtggcatgggcctggccaaacaggttcctcctcaggtaatccaattaaaggcatctgccacgccggtgtcagttcgtcagtatccgctgtcgaaagaagcgcaagaggggattcgcccacacgtgcagcgtttgatccagcagggcattctggtaccggttcaaagcccctggaataccccgcttttaccagtcaaaaaaccgggtacaaacgattaccgtcctgtgcaagacctgcgcgaagtcaataaacgtgtgcaggatatccacccaaccgttccgaacccgtataatctgttgtgcgcgttaccgccgcagcgttcctggtacacggtgctggacctgaaggacgcgttcttctgtcttcgcctccatcccaccagccagccactgtttgcctttgaatggcgcgatcctgatacgggccgtactgggcaattaacatggacccgtttgccgcagggctttaagaacagtcccaccatttttgatgaggctcttcaccgcgacctcgcaaatttccgcatccaacacccacaggtaacgttactccagtatgtcgatgatcttttgttagcgggtgccaccaaacaggactgcttggaaggaacgaaagcacttctcttggaactctcggatttaggttatcgtgtgtccgccaagaaagctcagatttgtcgccgcgaagtgacatacttaggctattcattgcgtgatggtcaacgttggcttactgaggcgcgcaagaagaccgttgttcaaatccccgcccctaataccccgaaacagatgcgtgaatttcttggcacggcaggtttctgccgtttgtggattcctggctttgctacgttagcggcacccctctatccactcacgaaagagaaaggagaattctcttgggccccagaacatcagaaagcgtttgacgccatcaagaaagcgttattaagcgctcctgctcttgcattgcccgatgtcaccaaaccattcacgctctacgtggatgaacgcaaaggcgtagcccgcggtgtgttgacacagaccttaggaccttggcgtcgtcccgtggcctacctctcgaagaaacttgacccagttgcaagtggttggcctgtctgcttgaaagctattgccgcagttgcaatcctcgtcaaagatgccgacaaacttactttgggccagaacattactgttattgcaccacacgcccttgaaaacatcgttcgtcagccacctgatcgctggatgaccaatgctcgcatgacgcattatcagagcctcttgcttaccgaacgcgtgacttttgctccacctgcagccttaaaccccgcaacccttttacccgaagaaacagatgagcctgtgacgcatgactgtcaccagctcttgattgaagaaactggcgtacgcaaagacctcaccgatattccattaacaggtgaggtacttacgtggtttaccgaggggtcctcttatgtcgtcgaaggcaaacgtatggctggtgccgccgttgttgatggcacccgtactatctgggcaagcagcttacccgaaggcacgagtgctcagaaagcagagttgatggccttgacccaagccttacgccttgctgaagggaaatcgatcaatatttacaccgactcacgctatgcattcgccacggcacatgtacacggtgccatctacaaacaacgtggtttgttaacttctgctggccgcgagattaagaacaaagaagaaatcctttccttacttgaagccttacacctccccaaacgtctcgctattattcattgtccagggcatcagaaagcaaaagatcctatcagccgtgggaatcaaatggcagatcgtgtcgctaaacaggcagcccaaggcgttaacttgttgcccatgattgagacccctaaagctcca

SEQ ID NO: 44 - protein, 687 aa, synthetic construct
  REGION 1..687: note = Engineered reverse transcriptase variants
MHHHHHHGGSGVLTLQLDDEYRLYSPLVKPDQNIQFWLEQFPQAWAETGGMGLAKQVPPQVIQLKASATPVSVRQYPLSKEAQEGIRPHVQRLIQQGILVPVQSPWNTPLLPVKKPGTNDYRPVQDLREVNKRVQDIHPTVPNPYNLLCALPPQRSWYTVLDLKDAFFCLRLHPTSQPLFAFEWRDPDTGRTGQLTWTRLPQGFKNSPTIFDEALHRDLANFRIQHPQVTLLQYVDDLLLAGATKQDCLEGTKALLLELSDLGYRVSAKKAQICRREVTYLGYSLRDGQRWLTEARKKTVVQIPAPNTPKQMREFLGTAGFCRLWIPGFATLAAPLYPLTKEKGEFSWAPEHQKAFDAIKKALLSAPALALPDVTKPFTLYVDERKGVARGVLTQTLGPWRRPVAYLSKKLDPVASGWPVCLKAIAAVAILVKDADKLTLGQNITVIAPHALENIVRQPPDRWMTNARMTHYQSLLLTERVTFAPPAALNPATLLPEETDEPVTHDCHQLLIEETGVRKDLTDIPLTGEVLTWFTEGSSYVVEGKRMAGAAVVDGTRTIWASSLPEGTSAQKAELMALTQALRLAEGKSINIYTDSRYAFATAHVHGAIYKQRGLLTSAGREIKNKEEILSLLEALHLPKRLAIIHCPGHQKAKDPISRGNQMADRVAKQAAQGVNLLPMIETPKAP

SEQ ID NO: 45 - DNA, 2061 bp, synthetic construct
  misc_feature 1..2061: note = Engineered reverse transcriptase variants
  source 1..2061: mol_type = other DNA
atgcatcaccatcaccatcatggtggtagcggagtgctgacccttcagctggatgatgaatatcgcttgtacagtccgctggtcaaaccagaccaaaacattcagttctggctcgaacagtttccgcaagcgtgggctgaaactgctggcatgggcctggccaaacaggttcctcctcaggtaatccaattaaaggcatctgccacgccggtgtcagttcgtcagtatccgctgtcgaaagaagcgcaagaggggattcgcccacacgttcagcgtttgatccagcagggcattctggtaccggttcaaagcccctggaataccccgcttttaccagtccgtaaaccgggtacaaacgattaccgtcctgtgcaagacctgcgcgaagtcaataaacgtgtgcaggatatccacccaaccgttccgaacccgtataatctgttgtgcgcgttaccgccgcagcgttcctggtacacggtgctggacctgaaggacgcgttcttctgtcttcgcctccaccccaccagccagccactgtttgcctttgaatggcgcgatcctgatacgggccgtactgggcaattaacatggacccgtttgccgcagggctttaagaacagtcccacgatctttgatgaggctcttcaccgcgacctcgcaaatttccgcatccaacacccacaggtaacgttactccagtatgtcgatgatcttttgttagcgggtgccaccaaacaggactgcttggaaggaacgaaagcacttctcttggaactctcggatttaggttatcgtgtgtccgccaagaaagctcagatttgtcgccgcgaagtgacatacttaggctattcattgcgtgatggtcaacgttggcttactgaggcgcgcaagaagaccgttgttcaaatccccgcccctaagaccgcgaaacagatgcgtgaatttcttggcacggcaggtgcgtgccgtttgtggattcctggctttgctaccttagcggcacccctctatccactcacgaaagagaaaggagaattctcttgggccccagaacatcagaaagcgtttgacgccatcaagaaagcgttattaagcgctcctgctcttgcattgcccgatgtcaccaaaccattcacgctctacgtggatgaacgcaaaggcgtagcccgcggtgtgttgacacagaccttaggaccttggcgtcgtcccgtggcctacctctcgaagaaacttgacccagttgcaagtggttggcctgtctgcttgaaagctattgccgcagttgcaatcctcgtcaaagatgccgacaaacttactttgggccagaacattactgttattgcaccacacgcccttgaaaacatcgttcgtcagccacctgatcgctggatgaccaatgctcgcatgacgcattatcagagcctcttgcttaccgaacgcgtgacttttgctccacctgcagccttaaaccccgcaacccttttacccgaagaaacagatgagcctgtgacgcatgactgtcaccagctcttgattgaagaaactggcgtacgcaaagacctcaccgatattccattaacaggtgaggtacttacgtggtttaccgaggggtcctcttatgtcgtcgaaggcaaacgtatggctggtgccgccgttgttgatggcacccgtactatctgggcaagcagcttacccgaaggcacgagtgctcagaaagcagatttgatggccttgacccaagccttacgccttgctgaagggaaatcgatcaatatttacaccgactcacgctatgcattcgccacggcacatgtacacggtgccatctacaaacaacgtggtttgttaacttctgctggccgcgagattaagaacaaagaagaaatcctttccttacttgaagccttacacctccccaaacgtctcgctattattcattgtccagggggtcagaaagcaaaagatcctatcagccgtgggaatcaaatggcagatcgtgtcgctaaacaggcagcccaaggcgttaacttgttgcccatgattgagacccctaaagctcca

SEQ ID NO: 46 - protein, 687 aa, synthetic construct
  REGION 1..687: note = Engineered reverse transcriptase variants
MHHHHHHGGSGVLTLQLDDEYRLYSPLVKPDQNIQFWLEQFPQAWAETAGMGLAKQVPPQVIQLKASATPVSVRQYPLSKEAQEGIRPHVQRLIQQGILVPVQSPWNTPLLPVRKPGTNDYRPVQDLREVNKRVQDIHPTVPNPYNLLCALPPQRSWYTVLDLKDAFFCLRLHPTSQPLFAFEWRDPDTGRTGQLTWTRLPQGFKNSPTIFDEALHRDLANFRIQHPQVTLLQYVDDLLLAGATKQDCLEGTKALLLELSDLGYRVSAKKAQICRREVTYLGYSLRDGQRWLTEARKKTVVQIPAPKTAKQMREFLGTAGACRLWIPGFATLAAPLYPLTKEKGEFSWAPEHQKAFDAIKKALLSAPALALPDVTKPFTLYVDERKGVARGVLTQTLGPWRRPVAYLSKKLDPVASGWPVCLKAIAAVAILVKDADKLTLGQNITVIAPHALENIVRQPPDRWMTNARMTHYQSLLLTERVTFAPPAALNPATLLPEETDEPVTHDCHQLLIEETGVRKDLTDIPLTGEVLTWFTEGSSYVVEGKRMAGAAVVDGTRTIWASSLPEGTSAQKADLMALTQALRLAEGKSINIYTDSRYAFATAHVHGAIYKQRGLLTSAGREIKNKEEILSLLEALHLPKRLAIIHCPGGQKAKDPISRGNQMADRVAKQAAQGVNLLPMIETPKAP

SEQ ID NO: 47 - DNA, 2061 bp, synthetic construct
  misc_feature 1..2061: note = Engineered reverse transcriptase variants
  source 1..2061: mol_type = other DNA
atgcatcaccatcaccatcatggtggtagcggagtgctgacccttcagctggatgatgaatatcgcttgtacagtccgctggtcaaaccagaccaaaacattcagttctggctcgaacagtttccgcaagcgtgggctgaaactgcaggcatgggcctggccaaacaggttcctcctcaggtaatccaattaaaggcatctgccacgccggtgtcagttcgtcagtatccgctgtcgaaagaagcgcaagaggggattcgcccacacgtgcagcgtttgatccagcagggcattctggtaccggttcaaagcccctggaataccccgcttttaccagtccgcaaaccgggtacaaacgattaccgtcctgtgcaagacctgcgcgaagtcaataaacgtgtgcaggatatccacccaaccgttccgaacccgtataatctgttgtgcgcgttaccgccgcagcgttcctggtacacggtgctggacctgaaggacgcgttcttctgtcttcgcctccatcccaccagccagccactgtttgcctttgaatggcgcgatcctgatacgggccgtactgggcaattaacatggacccgtttgccgcagggctttaagaacagtcccaccatttttgatgaggctcttcaccgcgacctcgcaaatttccgcatccaacacccacaggtaacgttactccagtatgtcgatgatcttttgttagcgggtgccaccaaacaggactgcttggaaggaacgaaagcacttctcttggaactctcggatttaggttatcgtgtgtccgccaagaaagctcagatttgtcgccgcgaagtgacatacttaggctattcattgcgtgatggtcaacgttggcttactgaggcgcgcaagaagaccgttgttcaaatccccgcccctacgaccccgaaacagatgcgtgaatttcttggcacggcaggtttttgccgtttgtggattcctggctttgctgaattagcggcacccctctatccactcacgaaagagaaaggagaattctcttgggccccagaacatcagaaagcgtttgacgccatcaagaaagcgttattaagcgctcctgctcttgcattgcccgatgtcaccaaaccattcacgctctacgtggatgaacgcaaaggcgtagcccgcggtgtgttgacacagaccttaggaccttggcgtcgtcccgtggcctacctctcgaagaaacttgacccagttgcaagtggttggcctgtctgcttgaaagctattgccgcagttgcaatcctcgtcaaagatgccgacaaacttactttgggccagaacattactgttattgcaccacacgcccttgaaaacatcgttcgtcagccacctgatcgctggatgaccaatgctcgcatgacgcattatcagagcctcttgcttaccgaacgcgtgacttttgctccacctgcagccttaaaccccgcaacccttttacccgaagaaacagatgagcctgtgacgcatgactgtcaccagctcttgattgaagaaactggcgtacgcaaagacctcaccgatattccattaacaggtgaggtacttacgtggtttaccgaggggtcctcttatgtcgtcgaaggcaaacgtatggctggtgccgccgttgttgatggcacccgtactatctgggcaagcagcttacccgaaggcacgagtgctcagaaagcacaattgatggccttgacccaagccttacgccttgctgaagggaaatcgatcaatatttacaccgactcacgcagcgcattcgccacggcacatgtacacggtgccatctacaaacaacgtggtttgttaacttctgctggccgcgagattaagaacaaagaagaaatcctttccttacttgaagccttacacctccccaaacgtctcgctattattcattgtccagggggtcagaaagcaaaagatcctatcagccgtgggaatcaaatggcagatcgtgtcgctaaacaggcagcccaaggcgttaacttgttgcccatgattgagacccctaaagctcca

SEQ ID NO: 48 - protein, 687 aa, synthetic construct
  REGION 1..687: note = Engineered reverse transcriptase variants
MHHHHHHGGSGVLTLQLDDEYRLYSPLVKPDQNIQFWLEQFPQAWAETAGMGLAKQVPPQVIQLKASATPVSVRQYPLSKEAQEGIRPHVQRLIQQGILVPVQSPWNTPLLPVRKPGTNDYRPVQDLREVNKRVQDIHPTVPNPYNLLCALPPQRSWYTVLDLKDAFFCLRLHPTSQPLFAFEWRDPDTGRTGQLTWTRLPQGFKNSPTIFDEALHRDLANFRIQHPQVTLLQYVDDLLLAGATKQDCLEGTKALLLELSDLGYRVSAKKAQICRREVTYLGYSLRDGQRWLTEARKKTVVQIPAPTTPKQMREFLGTAGFCRLWIPGFAELAAPLYPLTKEKGEFSWAPEHQKAFDAIKKALLSAPALALPDVTKPFTLYVDERKGVARGVLTQTLGPWRRPVAYLSKKLDPVASGWPVCLKAIAAVAILVKDADKLTLGQNITVIAPHALENIVRQPPDRWMTNARMTHYQSLLLTERVTFAPPAALNPATLLPEETDEPVTHDCHQLLIEETGVRKDLTDIPLTGEVLTWFTEGSSYVVEGKRMAGAAVVDGTRTIWASSLPEGTSAQKAQLMALTQALRLAEGKSINIYTDSRSAFATAHVHGAIYKQRGLLTSAGREIKNKEEILSLLEALHLPKRLAIIHCPGGQKAKDPISRGNQMADRVAKQAAQGVNLLPMIETPKAP

SEQ ID NO: 49 - DNA, 2061 bp, synthetic construct
  misc_feature 1..2061: note = Engineered reverse transcriptase variants
  source 1..2061: mol_type = other DNA
atgcatcaccatcaccatcatggtggtagcggagtgctgacccttcagctggatgatgaatatcgcttgtacagtccgctggtcaaaccagaccaaaacattcagttctggctcgaacagtttccgcaagcgtgggctgaaactgctggcatgggcctggccaaacaggttcctcctcaggtaatccaattaaaggcatctgccacgccggtgtcagttcgtcagtatccgctgtcgaaagaagcgcaagaggggattcgcccacacgtgcagcgtttgatccagcagggcattctggtaccggttcaaagcccctggaataccccgcttttaccagtccgcaaaccgggtacaaacgattaccgtcctgtgcaagacctgcgcgaagtcaataaacgtgtgcaggatatccacccaaccgttccgaacccgtataatctgttgtgcgcgttaccgccgcagcgttcctggtacacggtgctggacctgaaggacgcgttcttctgtcttcgcctcgcacccaccagccagccactgtttgcctttgaatggcgcgatcctgatacgggccgtactgggcaattaacatggacccgtttgccgcagggctttaagaacagtcccaccatttttgatgaggctcttcaccgcgacctcgcaaatttccgcatccaacacccacaggtaacgttactccagtatgtcgatgatcttttgttagcgggtgccaccaaacaggactgcttggaaggaacgaaagcacttctcttggaactctcggatttaggttatcgtgtgtccgccaagaaagctcagatttgtcgccgcgaagtgacatacttaggctattcattgcgtgatggtcaacgttggcttactgaggcgcgcaagaagaccgttgttcaaatccccgcccctacgaccgcgaaacagatgcgtgaatttcttggcacggcaggtttttgccgtttgtggattcctggctttgctgaattagcggcacccctctatccactcacgaaagagaaaggagaattctcttgggccccagaacatcagaaagcgtttgacgccatcaagaaagcgttattaagcgctcctgctcttgcattgcccgatgtcaccaaaccattcacgctctacgtggatgaacgcaaaggcgtagcccgcggtgtgttgacacagaccttaggaccttggcgtcgtcccgtggcctacctctcgaagaaacttgacccagttgcaagtggttggcctgtctgcttgaaagctattgccgcagttgcaatcctcgtcaaagatgccgacaaacttactttgggccagaacattactgttattgcaccacacgcccttgaaaacatcgttcgtcagccacctgatcgctggatgaccaatgctcgcatgacgcattatcagagcctcttgcttaccgaacgcgtgacttttgctccacctgcagccttaaaccccgcaacccttttacccgaagaaacagatgagcctgtgacgcatgactgtcaccagctcttgattgaagaaactggcgtacgcaaagacctcaccgatattccattaacaggtgaggtacttacgtggtttaccgaggggtcctcttatgtcgtcgaaggcaaacgtatggctggtgccgccgttgttgatggcacccgtactatctgggcaagcagcttacccgaaggcacgagtgctcagaaagcagatttgatggccttgacccaagccttacgccttgctgaagggaaatcgatcaatatttacaccgactcacgcagcgcattcgccacggcacatgtacacggtgccatctacaaacaacgtggtttgttaacttctgctggccgcgagattaagaacaaagaagaaatcctttccttacttgaagccttacacctccccaaacgtctcgctattattcattgtccagggcatcagaaagcaaaagatcctatcagccgtgggaatcaaatggcagatcgtgtcgctaaacaggcagcccaaggcgttaacttgttgcccatgattgagacccctaaagctcca

SEQ ID NO: 50 - protein, 687 aa, synthetic construct
  REGION 1..687: note = Engineered reverse transcriptase variants
MHHHHHHGGSGVLTLQLDDEYRLYSPLVKPDQNIQFWLEQFPQAWAETAGMGLAKQVPPQVIQLKASATPVSVRQYPLSKEAQEGIRPHVQRLIQQGILVPVQSPWNTPLLPVRKPGTNDYRPVQDLREVNKRVQDIHPTVPNPYNLLCALPPQRSWYTVLDLKDAFFCLRLAPTSQPLFAFEWRDPDTGRTGQLTWTRLPQGFKNSPTIFDEALHRDLANFRIQHPQVTLLQYVDDLLLAGATKQDCLEGTKALLLELSDLGYRVSAKKAQICRREVTYLGYSLRDGQRWLTEARKKTVVQIPAPTTAKQMREFLGTAGFCRLWIPGFAELAAPLYPLTKEKGEFSWAPEHQKAFDAIKKALLSAPALALPDVTKPFTLYVDERKGVARGVLTQTLGPWRRPVAYLSKKLDPVASGWPVCLKAIAAVAILVKDADKLTLGQNITVIAPHALENIVRQPPDRWMTNARMTHYQSLLLTERVTFAPPAALNPATLLPEETDEPVTHDCHQLLIEETGVRKDLTDIPLTGEVLTWFTEGSSYVVEGKRMAGAAVVDGTRTIWASSLPEGTSAQKADLMALTQALRLAEGKSINIYTDSRSAFATAHVHGAIYKQRGLLTSAGREIKNKEEILSLLEALHLPKRLAIIHCPGHQKAKDPISRGNQMADRVAKQAAQGVNLLPMIETPKAP

SEQ ID NO: 51 - DNA, 2061 bp, synthetic construct
  misc_feature 1..2061: note = Engineered reverse transcriptase variants
  source 1..2061: mol_type = other DNA
atgcatcaccatcaccatcatggtggtagcggagtgctgacccttcagctggatgatgaatatcgcttgtacagtccgctggtcaaaccagaccaaaacattcagttctggctcgaacagtttccgcaagcgtgggctgaaactggtggcatgggcctggccaaacaggttcctcctcaggtaatccaattaaaggcatctgccacgccggtgtcagttcgtcagtatccgctgtcgaaagaagcgcaagaggggattcgcccacacgtgcagcgtttgatccagcagggcattctggtaccggttcaaagcccctggaataccccgcttttaccagtccgcaaaccgggtacaaacgattaccgtcctgtgcaagacctgcgcgaagtcaataaacgtgtgcaggatatccacccaaccgttccgaacccgtataatctgttgtgcgcgttaccgccgcagcgttcctggtacacggtgctggacctgaaggacgcgttcttctgtcttcgtctccaccccaccagccagccactgtttgcctttgaatggcgcgatcctgatacgggccgtactgggcaattaacatggacccgtttgccgcagggctttaagaacagtcccaccatttttgatgaggctcttcaccgcgacctcgcaaatttccgcatccaacacccacaggtaacgttactccagtatgtcgatgatcttttgttagcgggtgccaccaaacaggactgcttggaaggaacgaaagcacttctcttggaactctcggatttaggttatcgtgtgtccgccaagaaagctcagatttgtcgccgcgaagtgacatacttaggctattcattgcgtgatggtcaacgttggcttactgaggcgcgcaagaagaccattgttcaaatccccgcccctaccaccgcgaagcagatgcgtgaatttcttggcacggcaggtttctgccgtttgtggattcctggctttgctaccttagcggcacccctctatccactcacgaaagagaaaggagaattctcttgggccccagaacatcagaaagcgtttgacgccatcaagaaagcgttattaagcgctcctgctcttgcattgcccgatgtcaccaaaccattcacgctctacgtggatgaacgcaaaggcgtagcccgcggtgtgttgacacagaccttaggaccttggcgtcgtcacgtggcctacctctcgaagaaacttgacccagttgcaagtggttggcctgtctgcttgaaagctattgccgcagttgcaatcctcgtcaaagatgccgacaaacttactttgggccagaacatcactgttattgcaccacacgcccttgaaaacatcgttcgtcagccacctgatcgctggatgaccaatgctcgcatgacgcattatcagagcctcttgcttaccgaacgcgtgacttttgctccacctgcagccttaaaccccgcaacccttttacccgaagaaacagatgagcctgtgacgcatgactgtcaccagctcttgattgaagaaactggcgtacgcaaagacctcaccgatattccattaacaggtgaggtacttacgtggtttaccgatgggtcctcttatgtcgtcgaaggcaaacgtatggctggtgccgccgttgttgatggcacccgtactatctgggcaagcagcttacccgaaggcacgagtgctcagaaagcagagttgatggccttgacccaagccttacgccttgctgaagggaaatcgatcaatatttacaccgactcacgctatgcattcgccacggcacatgtacacggtgccatctacaaacaacgtggtttgttaacttctgctggccgcgagattaagaacaaagaagaaatcctttccttacttgaagccttacacctccccaaacgtctcgctattattcattgtccagggcatcagaaagcaaaagatcctatcagccgtgggaatcagatggcagatcgtgtcgctaaacaggcagcccaaggcgttaacttgttgcccatgattgagacccctaaagctcca

SEQ ID NO: 52 - protein, 687 aa, synthetic construct
  REGION 1..687: note = Engineered reverse transcriptase variants
MHHHHHHGGSGVLTLQLDDEYRLYSPLVKPDQNIQFWLEQFPQAWAETGGMGLAKQVPPQVIQLKASATPVSVRQYPLSKEAQEGIRPHVQRLIQQGILVPVQSPWNTPLLPVRKPGTNDYRPVQDLREVNKRVQDIHPTVPNPYNLLCALPPQRSWYTVLDLKDAFFCLRLHPTSQPLFAFEWRDPDTGRTGQLTWTRLPQGFKNSPTIFDEALHRDLANFRIQHPQVTLLQYVDDLLLAGATKQDCLEGTKALLLELSDLGYRVSAKKAQICRREVTYLGYSLRDGQRWLTEARKKTIVQIPAPTTAKQMREFLGTAGFCRLWIPGFATLAAPLYPLTKEKGEFSWAPEHQKAFDAIKKALLSAPALALPDVTKPFTLYVDERKGVARGVLTQTLGPWRRHVAYLSKKLDPVASGWPVCLKAIAAVAILVKDADKLTLGQNITVIAPHALENIVRQPPDRWMTNARMTHYQSLLLTERVTFAPPAALNPATLLPEETDEPVTHDCHQLLIEETGVRKDLTDIPLTGEVLTWFTDGSSYVVEGKRMAGAAVVDGTRTIWASSLPEGTSAQKAELMALTQALRLAEGKSINIYTDSRYAFATAHVHGAIYKQRGLLTSAGREIKNKEEILSLLEALHLPKRLAIIHCPGHQKAKDPISRGNQMADRVAKQAAQGVNLLPMIETPKAP

SEQ ID NO: 53 - DNA, 2061 bp, synthetic construct
  misc_feature 1..2061: note = Engineered reverse transcriptase variants
  source 1..2061: mol_type = other DNA
atgcatcaccatcaccatcatggtggtagcggagtgctgacccttcagctggatgatgaatatcgcttgtacagtccgctggtcaaaccagaccaaaacattcagttctggctcgaacagtttccgcaagcgtgggctgaaactgctggcatgggcctggccaaacaggttcctcctcaggtaatccaattaaaggcatctgccacgccggtgtcagttaagcagtatccgctgtcgaaagaagcgcaagaggggattcgcccacacgtgcagcgtttgatccagcagggcattctggtaccggttcaaagcccctggaataccccgcttttaccagtccgcaaaccgggtacaaacgattaccgtcctgtgcaagacctgcgcgaagtcaataaacgtgtgcaggatatccacccaaccgttccgaacccgtataatctgttgtgcgcgttaccgccgcagcgttcctggtacacggtgctggacctgaaggacgcgttcttctgtcttcgcctccaccccaccagccagccactgtttgcctttgaatggcgcgatcctgatacgggccgtactgggcaattaacatggacccgtttgccgcagggctttaagaacagtcccaccatttttgatgaggctcttcaccgcgacctcgcaaatttccgcatccaacacccacaggtaacgttactccagtatgtcgatgatcttttgttagcggctgccaccaaacaggactgcttggaaggaacgaaagcacttctcttggaactctcggatttaggttatcgtgtgtccgccaagaaagctcagatttgtcgccgcgaagtgacatacttaggctattcattgcgtgatggtcaacgttggcttactgaggcgcgcaagaagaccgttgttcaaatccccgcccctaccaccgcgaagcagatgcgtgaatttcttggcacggcaggtttctgccgtttgtggattcctggctttgctaccttagcggcacccctctatccactcacgaaagagaaaggagaattctcttgggccccagaacatcagaaagcgtttgacgccatcaagaaagcgttattaagcgctcctgctcttgcattgcccgatgtcaccaaaccattcacgctctacgtggatgaacgcaaaggcgtagcccgcggtgtgttgacacagaccttaggaccttggcgtcgtcccgtggcctacctctcgaagaaacttgacccagttgcaagtggttggcctgtctgcttgaaagctattgccgcagttgcaatcctcgtcaaagatgccgacaaacttactttgggccagaacattactgttattgcaccacacgcccttgaaaacatcgttcgtcagccacctgatcgctggatgaccaatgctcgcatgacgcattatcagagcctcttgcttaccgaacgcgtgacttttgctccacctgcagccttaaaccccgcaacccttttacccgaagaaacagatgagcctgtgacgcatgactgtcaccagctcttgattgaagaaactggcgtacgcaaagacctcaccgatattccattaacaggtgaggtacttacgtggtttaccgatgggtcctcttatgtcgtcgaaggcaaacgtatggctggtgccgccgttgttgatggcacccgtactatctgggcaagcagcttacccgaaggcacgagtgctcagaaagcagagttgatggccttgacccaagccttacgccttgctgaagggaaatcgatcaatatttacaccgactcacgctatgcattcgccacggcacatgtacacggtgccatctacaaacaacgtggtttgttaacttctgctggccgcgagattaagaacaaagaagaaatcctttccttacttgaagccttacacctccccaaacgtctcgctattattcattgtccagggcatcagaaagcaaaagatcctatcagccgtgggaatcaaatggcagatcgtgtcgctaaacaggcagcccaaggcgttaacttgttgcccatgattgagacccctaaagctcca

SEQ ID NO: 54 - protein, 687 aa, synthetic construct
  REGION 1..687: note = Engineered reverse transcriptase variants
MHHHHHHGGSGVLTLQLDDEYRLYSPLVKPDQNIQFWLEQFPQAWAETAGMGLAKQVPPQVIQLKASATPVSVKQYPLSKEAQEGIRPHVQRLIQQGILVPVQSPWNTPLLPVRKPGTNDYRPVQDLREVNKRVQDIHPTVPNPYNLLCALPPQRSWYTVLDLKDAFFCLRLHPTSQPLFAFEWRDPDTGRTGQLTWTRLPQGFKNSPTIFDEALHRDLANFRIQHPQVTLLQYVDDLLLAAATKQDCLEGTKALLLELSDLGYRVSAKKAQICRREVTYLGYSLRDGQRWLTEARKKTVVQIPAPTTAKQMREFLGTAGFCRLWIPGFATLAAPLYPLTKEKGEFSWAPEHQKAFDAIKKALLSAPALALPDVTKPFTLYVDERKGVARGVLTQTLGPWRRPVAYLSKKLDPVASGWPVCLKAIAAVAILVKDADKLTLGQNITVIAPHALENIVRQPPDRWMTNARMTHYQSLLLTERVTFAPPAALNPATLLPEETDEPVTHDCHQLLIEETGVRKDLTDIPLTGEVLTWFTDGSSYVVEGKRMAGAAVVDGTRTIWASSLPEGTSAQKAELMALTQALRLAEGKSINIYTDSRYAFATAHVHGAIYKQRGLLTSAGREIKNKEEILSLLEALHLPKRLAIIHCPGHQKAKDPISRGNQMADRVAKQAAQGVNLLPMIETPKAP

SEQ ID NO: 55 - DNA, 2061 bp, synthetic construct
  misc_feature 1..2061: note = Engineered reverse transcriptase variants
  source 1..2061: mol_type = other DNA
atgcatcaccatcaccatcatggtggtagcggagtgctgacccttcagctggatgatgaatatcgcttgtacagtccgctggtcaaaccagaccaaaacattcagttctggctcgaacagtttccgcaagcgtgggctgaaactgctggcatgggcctggccaaacaggttcctcctcaggtaatccaattaaaggcatctgccacgccggtgtcagttcgtcagtatccgctgtcgaaagaagcgcaagaggggattcgcccacacgtgcagcgtttgatccagcagggcattctggtaccggttcaaagcccctggaataccccgcttttaccagtccgcaaaccgggtacaaacgattaccgtcctgtgcaagacctgcgcgaagtcaataaacgtgtgcaggatatccacccaaccgttccgaacccgtataatctgttgtgcgcgttaccgccgcagcgttcctggtacacggtgctggacctgaaggacgcgttcttctgtcttcgcctccaccccaccagccagccactgtttgcctttgaatggcgcgatcctgatacgggccgtactgggcaattaacatggacccgtttgccgcagggctttaagaacagtcccaccatttttgatgaggctcttcaccgcgacctcgcaaatttccgcatccaacacccacaggtaacgttactccagtatgtcgatgatcttttgttagcggctgccaccaaacaggactgcttggaaggaacgaaagcacttctcttggaactctcggatttaggttatcgtgtgtccgccaagaaagctcagatttgtcgccgcgaagtgacatacttaggctattcattgcgtgatggtcaacgttggcttactgaggcgcgcaaggagaccgttgttcaaatccccgcccctaccaccgcgaagcagatgcgtgaatttcttggcacggcaggtttctgccgtttgtggattcctggctttgctaccttagcggcacccctctatccactcacgaaagagaaaggagaattctcttgggccccagaacatcagaaagcgtttgacgccatcaagaaagcgttattaagcgctcctgctcttgcattgcccgatgtgaccaaaccattcacgctctacgtggatgaacgcaaaggcgtagcccgcggtgtgttgacacagaccttaggaccttggcgtcgtcccgtggcctacctctcgaagaaacttgacccagttgcaagtggttggcctgtctgcttgaaagctattgccgcagttgcaatcctcgtcaaagatgccgacaaacttactttgggccagaacatcactgttattgcaccacacgcccttgaaaatatcgttcgtcagccacctgatcgctggatgaccaatgctcgcatgacgcattatcagagcctcttgcttaccgaacgcgtgacttttgctccacctgcagccttaaaccccgcaacccttttacccgaagaaacagatgagcctgtgacgcatgactgtctgcagctcttgattgaagaaactggcgtacgcaaagacctcaccgatattccattaacaggtgaggtacttacgtggtttaccgatgggtcctcttatgtcgtcgaaggcaaacgtatggctggtgccgccgttgttgatggcacccgtactatctgggcaagcagcttacccgaaggcacgagtgctcagaaagcagagttgatggccttgacccaagccttacgccttgctgaagggaaatcgatcaatatttacaccgactcacgctatgcattcgccacggcacatgtacacggtgccatctacaaacaacgtggtttgttaacttctgctggccgcgagattaagaacaaagaagaaatcctttccttacttgaagccttacacctccccaaacgtctcgctattattcattgtccagggcatcagaaagcaaaagatcctatcagccgtgggaatcgtatggcagatcgtgtcgctaaacaggcagcccaaggcgttaacttgttgcccatgattgagacccctaaagctcca

SEQ ID NO: 56 - protein, 687 aa, synthetic construct
  REGION 1..687: note = Engineered reverse transcriptase variants
MHHHHHHGGSGVLTLQLDDEYRLYSPLVKPDQNIQFWLEQFPQAWAETAGMGLAKQVPPQVIQLKASATPVSVRQYPLSKEAQEGIRPHVQRLIQQGILVPVQSPWNTPLLPVRKPGTNDYRPVQDLREVNKRVQDIHPTVPNPYNLLCALPPQRSWYTVLDLKDAFFCLRLHPTSQPLFAFEWRDPDTGRTGQLTWTRLPQGFKNSPTIFDEALHRDLANFRIQHPQVTLLQYVDDLLLAAATKQDCLEGTKALLLELSDLGYRVSAKKAQICRREVTYLGYSLRDGQRWLTEARKETVVQIPAPTTAKQMREFLGTAGFCRLWIPGFATLAAPLYPLTKEKGEFSWAPEHQKAFDAIKKALLSAPALALPDVTKPFTLYVDERKGVARGVLTQTLGPWRRPVAYLSKKLDPVASGWPVCLKAIAAVAILVKDADKLTLGQNITVIAPHALENIVRQPPDRWMTNARMTHYQSLLLTERVTFAPPAALNPATLLPEETDEPVTHDCLQLLIEETGVRKDLTDIPLTGEVLTWFTDGSSYVVEGKRMAGAAVVDGTRTIWASSLPEGTSAQKAELMALTQALRLAEGKSINIYTDSRYAFATAHVHGAIYKQRGLLTSAGREIKNKEEILSLLEALHLPKRLAIIHCPGHQKAKDPISRGNRMADRVAKQAAQGVNLLPMIETPKAP

SEQ ID NO: 57 - DNA, 2061 bp, synthetic construct
  misc_feature 1..2061: note = Engineered reverse transcriptase variants
  source 1..2061: mol_type = other DNA
atgcatcaccatcaccatcatggtggtagcggagtgctgacccttcagctggatgatgaatatcgcttgtacagtccgctggtcaaaccagaccaaaacattcagttctggctcgaacagtttccgcaagcgtgggctgaaactgcaggcatgggcctggccaaacaggttcctcctcaggtaatccaattaaaggcatctgccacgccggtgtcagttcgtcagtatccgctgtcgaaagaagcgcaagaggggattcgcccacacgtgcagcgtttgatccagcagggcattctggtaccggttcaaagcccctggaataccccgcttttaccagtccgcaaaccgggtacaaacgattaccgtcctgtgcaagacctgcgcgaagtcaataaacgtgtgcaggatatccacccaaccgttccgaacccgtataatctgttgtgcgcgttaccgccgcagcgttcctggtacacggtgctggacctgaaggacgcgttcttctgtcttcgcctccaccccaccagccagccactgtttgcctttgaatggcgcgatcctgatacgggccgtactgggcaattaacatggacccgtttgccgcagggctttaagaacagtcccaccatttttgatgaggctcttcaccgcgacctcgcaaatttccgcatccaacacccacaggtaacgttactccagtatgtcgatgatcttttgttagcgggtgccaccaaacaggactgcttggaaggaacgaaagcacttctcttggaactcggcgatttaggttatcgtgtgtccgccaagaaagctcagatttgtcgccgcgaagtgacatacttaggctattcattgcgtgatggtcaacgttggcttactgaggcgcgcaagaagaccgttgttcaaatccccgcccctaccaccgcgaaacagatgcgtgaatttcttggcacggcaggtttctgccgtttgtggattcctggctttgctaccttagcggcacccctctatccactcacgaaagagaaaggagaattctcttgggccccagaacatcagaaagcgtttgacgccatcaagaaagcgttattaagcgctcctgctcttgcattgcccgatgtcaccaaaccattcacgctctacgtggatgaacgcaaaggcgtagcccgcggtgtgttgacacagaccttaggaccttggcgtcgtcccgtggcctacctctcgaagaaacttgacccagttgcaagtggttggcctgtctgcttgaaagctattgccgcagttgcaatcctcgtcaaagatgccgacaaacttactttgggccagaacattactgttattgcaccacacgcccttgaaaacatcgttcgtcagccacctgatcgctggatgaccaatgctcgcatgacgcattatcagagcctcttgcttaccgaacgcgtgacttttgctccacctgcagccttaaaccccgcaacccttttacccgaagaaacagatgagcctgtgacgcatgactgtcacgagctcttgattgaagaaactggcgtacgcaaagacctcaccgatattccattaacaggtgaggtacttacgtggtttaccgatgggtcctcttatgtcgtcgaaggcaaacgtatggctggtgccgccgttgttgatggcacccgtactatctgggcaagcagcttacccgaaggcacgagtgctcagaaagcagagttgatggccttgacccaagccttacgccttgctgaagggaaatcgatcaatatttacaccgactcacgctatgcattcgccacggcacatgtacacggtgccatctacaaacaacgtggtttgttaacttctgctggccgcgagattaagaacaaagaagaaatcctttccttacttgaagccttacacctccccaaacgtctcgctattattcattgtccagggcatcagaaagcaaaagatcctatcagccgtgggaatcaaatggcagatcgtgtcgctaaacaggcagcccaaggcgttaacttgttgcccatgattgagacccctaaagctcca

SEQ ID NO: 58 - protein, 687 aa, synthetic construct
  REGION 1..687: note = Engineered reverse transcriptase variants
MHHHHHHGGSGVLTLQLDDEYRLYSPLVKPDQNIQFWLEQFPQAWAETAGMGLAKQVPPQVIQLKASATPVSVRQYPLSKEAQEGIRPHVQRLIQQGILVPVQSPWNTPLLPVRKPGTNDYRPVQDLREVNKRVQDIHPTVPNPYNLLCALPPQRSWYTVLDLKDAFFCLRLHPTSQPLFAFEWRDPDTGRTGQLTWTRLPQGFKNSPTIFDEALHRDLANFRIQHPQVTLLQYVDDLLLAGATKQDCLEGTKALLLELGDLGYRVSAKKAQICRREVTYLGYSLRDGQRWLTEARKKTVVQIPAPTTAKQMREFLGTAGFCRLWIPGFATLAAPLYPLTKEKGEFSWAPEHQKAFDAIKKALLSAPALALPDVTKPFTLYVDERKGVARGVLTQTLGPWRRPVAYLSKKLDPVASGWPVCLKAIAAVAILVKDADKLTLGQNITVIAPHALENIVRQPPDRWMTNARMTHYQSLLLTERVTFAPPAALNPATLLPEETDEPVTHDCHELLIEETGVRKDLTDIPLTGEVLTWFTDGSSYVVEGKRMAGAAVVDGTRTIWASSLPEGTSAQKAELMALTQALRLAEGKSINIYTDSRYAFATAHVHGAIYKQRGLLTSAGREIKNKEEILSLLEALHLPKRLAIIHCPGHQKAKDPISRGNQMADRVAKQAAQGVNLLPMIETPKAP

SEQ ID NO: 59 - DNA, 2061 bp, synthetic construct
  misc_feature 1..2061: note = Engineered reverse transcriptase variants
  source 1..2061: mol_type = other DNA
atgcatcaccatcaccatcatggtggtagcggagtgctgacccttcagctggatgatgaatatcgcttgtacagtccgctggtcaaaccagaccaaaacattcagttctggctcgaacagtttccgcaagcgtgggctgaaactgcaggcatgggcctggccaaacaggttcctcctcaggtaatccaattaaaggcatctgccacgccggtgtcagttcgtcagtatccgctgtcgaaagaagcgcaagaggggattcgcccacacgtgcagcgtttgatccagcagggcattctggtaccgtgtcaaagcccctggaataccccgcttttaccagtccgcaaaccgggtacaaacgattaccgtcctgtgcaagacctgcgcgaagtcaataaacgtgtgcaggatatccacccaaccgttccgaacccgtataatctgttgtgcgcgttaccgccgcagcgttcctggtacacggtgctggacctgaaggacgcgttcttctgtcttcgcctccaccccaccagccagccactgtttgcctttgaatggcgcgatcctgatacgggccgtactgggcaattaacatggacccgtttgccgcagggctttaagaacagtcccaccatttttgatgaggctcttcaccgcgacctcgcaaatttccgcatccaacacccacaggtaacgttactccagtatgtcgatgatcttttgttagcgggtgccaccaaacaggactgcttggaaggaacgaaagcacttctcttggaactctcggatttaggttatcgtgtgtccgccaagaaagctcagatttgtcgccgcgaagtgacatacttaggctattcattgcgtgatggtcaacgttggcttactgaggcgcgcaagaagaccgttgttcaaatccccgcccctaccaccgcgaaacagatgcgtgaatttcttggcacggcaggtttctgccgtttgtggattcctggctttgctaccttagcggcacccctctatccactcacgaaagagaaaggagaattctcttgggccccagaacatcagaaagcgtttgacgccatcaagaaagcgttattaagcgctcctgctcttgggttgcccgatgtcaccaaaccattcacgctctacgtggatgaacgcaaaggcgtagcccgcggtgtgttgacacagaccttaggaccttggcgtcgtcccgtggcctacctctcgaagaaacttgacccagttgcaagtggttggcctgtctgcttgaaagctattgccgcagttgcaatcctcgtcaaagatgccgacaaacttactttgggccagaacattactgttattgcaccacacgcccttgaaaacatcgttcgtcagccacctgatcgctggatgaccaatgctcgcatgacgcattatcagagcctcttgcttaccgaacgcgtgacttttgctccacctgcagccttaaaccccgcaacccttttacccgaagaaacagatgagcctgtgacgcatgactgtcacgagctcttgattgaagaaactggcgtacgcaaagacctcaccgatattccattaacaggtgaggtacttacgtggtttaccgatgggtcctcttatgtcgtcgaaggcaaacgtatggctggtgccgccgttgttgatggcacccgtactatctgggcaagcagcttacccgaaggcacgagtgctcagaaagcagagttgatggccttgacccaagccttacgccttgctgaagggaaatcgatcaatatttacaccgactcacgctatgcattcgccacggcacatgtacacggtgccatctacaaacaacgtggtttgttaacttctgctggccgcgagattaagaacaaagaagaaatcctttccttacttgaagccttacacctccccaaacgtctcgctattattcattgtccagggcatcagaaagcaaaagatcctatcagccgtgggaatcaaatggcagatcgtgtcgctaaacaggcagcccaaggcgttaacttgttgcccatgattgagacccctaaagctcca

SEQ ID NO: 60 - protein, 687 aa, synthetic construct
  REGION 1..687: note = Engineered reverse transcriptase variants
MHHHHHHGGSGVLTLQLDDEYRLYSPLVKPDQNIQFWLEQFPQAWAETAGMGLAKQVPPQVIQLKASATPVSVRQYPLSKEAQEGIRPHVQRLIQQGILVPCQSPWNTPLLPVRKPGTNDYRPVQDLREVNKRVQDIHPTVPNPYNLLCALPPQRSWYTVLDLKDAFFCLRLHPTSQPLFAFEWRDPDTGRTGQLTWTRLPQGFKNSPTIFDEALHRDLANFRIQHPQVTLLQYVDDLLLAGATKQDCLEGTKALLLELSDLGYRVSAKKAQICRREVTYLGYSLRDGQRWLTEARKKTVVQIPAPTTAKQMREFLGTAGFCRLWIPGFATLAAPLYPLTKEKGEFSWAPEHQKAFDAIKKALLSAPALGLPDVTKPFTLYVDERKGVARGVLTQTLGPWRRPVAYLSKKLDPVASGWPVCLKAIAAVAILVKDADKLTLGQNITVIAPHALENIVRQPPDRWMTNARMTHYQSLLLTERVTFAPPAALNPATLLPEETDEPVTHDCHELLIEETGVRKDLTDIPLTGEVLTWFTDGSSYVVEGKRMAGAAVVDGTRTIWASSLPEGTSAQKAELMALTQALRLAEGKSINIYTDSRYAFATAHVHGAIYKQRGLLTSAGREIKNKEEILSLLEALHLPKRLAIIHCPGHQKAKDPISRGNQMADRVAKQAAQGVNLLPMIETPKAP

SEQ ID NO: 61 - DNA, 2061 bp, synthetic construct
  misc_feature 1..2061: note = Engineered reverse transcriptase variants
  source 1..2061: mol_type = other DNA
atgcatcaccatcaccatcatggtggtagcggagtgctgacccttcagctggatgatgaatatcgcttgtacagtccgctggtcaaaccagaccaaaacattcagttctggctcgaacagtttccgcaagcgtgggctgaaactggtggcatgggcctggccaaacaggttcctcctcaggtaatccaattaaaggcatctgccacgccggtgtcagttcgtcagtatccgctgtcgaaagaagcgcaagaggggattcgcccacacgtgcagcgtttgatccagcagggcattctggtaccggttcaaagcccctggaataccccgcttttaccagtccgcaaaccgggtacaaacgattaccgtcctgtgcaagacctgcgcgaagtcaataaacgtgtgcaggatatccacccaaccgttccgaacccgtataatctgttgtgcgcgttaccgccgcagcgttcctggtacacggtgctggacctgaaggacgcgttcttctgtcttcgcctcgcacccaccagccagccactgtttgcctttgaatggcgcgatcctgatacgggccgtactgggcaattaacatggacccgtttgccgcagggctttaagaacagtcccaccatttttgatgaggctcttcgtcgcgacctcgcaaatttccgcatccaacacccacaggtaacgttactccagtatgtcgatgatcttttgttagcgggtgccaccaaacaggactgcttggaaggaacgaaagcacttctcttggaactctcggatttaggttatcgtgtgtccgccaagaaagctcagatttgtcgccgcgaagtgacatacttaggctattcattgcgtgatggtcaacgttggcttactgaggcgcgcaagaagaccgttgttcaaatccccgcccctacgaccgcgaaacagatgcgtgaatttcttggcacggcaggtttttgccgtttgtggattcctggctttgctacgttagcggcacccctctatccactcacgaaagagaaaggagaattctcttggggtccagaacatcagaaagcgtttgacgccatcaagaaagcgttattaagcgctcctgctcttgcattgcccgatgtcaccaaaccattcacgctctacgtggatgaacgcaaaggcgtagcccgcggtgtgttgacacagaccttaggaccttggcgtcgtcccgtggcctacctctcgaagaaacttgacccagttgcaagtggttggcctgtctgcttgaaagctattgccgcagttgcaatcctcgtcaaagatgccgacaaacttactttgggccagaacattactgttattgcaccacacgcccttgaaaacatcgttcgtcagccacctgatcgctggatgaccaatgctcgcatgacgcattatcagagcctcttgcttaccgaacgcgtgacttttgctccacctgcagccttaaaccccgcaacccttttacccgaagaaacagatgagcctgtgacgcatgactgtcaccagctcttgattgaagaaactggcgtacgcaaagacctcaccgatattccattaacaggtgaggtacttacgtggtttaccgaggggtcctcttatgtcgtcgaaggcaaacgtatggctggtgccgccgttgttgatggcacccgtactatctgggcaagcagcttacccgaaggcacgagtgctcagaaagcagagttgatggccttgacccaagccttacgccttgctgaagggaaatcgatcaatatttacaccgactcacgcagcgcattcgccacggcacatgtacacggtgccatctacaaacaacgtggtttgttaacttctgctggccgcgagattaagaacaaagaagaaatcctttccttacttgaagccttacacctccccaaacgtctcgctattattcattgtccagggcatcagaaagcaaaagatcctatcagccgtgggaatcaaatggcagatcgtgtcgctaaacaggcagcccaaggcgttaacttgttgcccatgattgagacccctaaagctcca

SEQ ID NO: 62 - protein, 687 aa, synthetic construct
  REGION 1..687: note = Engineered reverse transcriptase variants
MHHHHHHGGSGVLTLQLDDEYRLYSPLVKPDQNIQFWLEQFPQAWAETGGMGLAKQVPPQVIQLKASATPVSVRQYPLSKEAQEGIRPHVQRLIQQGILVPVQSPWNTPLLPVRKPGTNDYRPVQDLREVNKRVQDIHPTVPNPYNLLCALPPQRSWYTVLDLKDAFFCLRLAPTSQPLFAFEWRDPDTGRTGQLTWTRLPQGFKNSPTIFDEALRRDLANFRIQHPQVTLLQYVDDLLLAGATKQDCLEGTKALLLELSDLGYRVSAKKAQICRREVTYLGYSLRDGQRWLTEARKKTVVQIPAPTTAKQMREFLGTAGFCRLWIPGFATLAAPLYPLTKEKGEFSWGPEHQKAFDAIKKALLSAPALALPDVTKPFTLYVDERKGVARGVLTQTLGPWRRPVAYLSKKLDPVASGWPVCLKAIAAVAILVKDADKLTLGQNITVIAPHALENIVRQPPDRWMTNARMTHYQSLLLTERVTFAPPAALNPATLLPEETDEPVTHDCHQLLIEETGVRKDLTDIPLTGEVLTWFTEGSSYVVEGKRMAGAAVVDGTRTIWASSLPEGTSAQKAELMALTQALRLAEGKSINIYTDSRSAFATAHVHGAIYKQRGLLTSAGREIKNKEEILSLLEALHLPKRLAIIHCPGHQKAKDPISRGNQMADRVAKQAAQGVNLLPMIETPKAP

SEQ ID NO: 63 - DNA, 2061 bp, synthetic construct
  misc_feature 1..2061: note = Engineered reverse transcriptase variants
  source 1..2061: mol_type = other DNA
atgcatcaccatcaccatcatggtggtagcggagtgctgacccttcagctggatgatgaatatcgcttgtacagtccgctggtcaaaccagaccaaaacattcagttctggctcgaacagtttccgcaagcgtgggctgaaactggtggcatgggcctggccaaacaggttcctcctcaggtaatccagttaaaggcatctgccacgccggtgtcagttcgtcagtatccgctgtcgaaagaagcgcaagaggggattcgcccacacgttcagcgtttgatccagcagggcattctggtaccggttcaaagcccctggaataccccgcttttaccagtcaaaaaaccgggtacaaacgattaccgtcctgtgcaagacctgcgcgaagtcaataaacgtgtgcaggatatccacccaaccgttccgaacccgtataatctgttgtgcgcgttaccgccgcagcgttcctggtacacggtgctggacctgaaggacgcgttcttctgtcttcgcctccatcccaccagccagccactgtttgcctttgaatggcgcgatcctgatacgggccgtactgggcaattaacatggacccgtttgccgcagggctttaagaacagtcccacgatctttgatgaggctcttcgtcgcgacctcgcaaatttccgcatccaacacccacaggtaacgttactccagtatgtcgatgatcttttgttagcgggtgccaccaaacaggactgcttggaaggaacgaaagcacttctcttggaactctcggatttaggttatcgtgtgtccgccaagaaagctcagatttgtcgccgcgaagtgacatacttaggctattcattgcgtgatggtcaacgttggcttactgaggcgcgcaagaagaccgttgttcaaatccccgcccctaagaccccgaaacagatgcgtgaatttcttggcacggcaggtttttgccgtttgtggattcctggctttgctgaattagcggcacccctctatccactcacgaaagagaaaggagaattctcttgggccccagaacatcagaaagcgtttgacgccatcaagaaagcgttattaagcgctcctgctcttgcattgcccgatgtcaccaaaccattcacgctctacgtggatgaacgcaaaggcgtagcccgcggtgtgttgacacagaccttaggaccttggcgtcgtcccgtggcctacctctcgaagaaacttgacccagttgcaagtggttggcctgtctgcttgaaagctattgccgcagttgcaatcctcgtcaaagatgccgacaaacttactttgggccagaacattactgttattgcaccacacgcccttgaaaacatcgttcgtcagccacctgatcgctggatgaccaatgctcgcatgacgcattatcagagcctcttgcttaccgaacgcgtgacttttgctccacctgcagccttaaaccccgcaacccttttacccgaagaaacagatgagcctgtgacgcatgactgtcaccagctcttgattgaagaaactggcgtacgcaaagacctcaccgatattccattaacaggtgaggtacttacgtggtttaccgacgggtcctcttatgtcgtcgaaggcaaacgtatggctggtgccgccgttgttgatggcacccgtactatctgggcaagcagcttacccgaaggcacgagtgctcagaaagcagagttgatggccttgacccaagccttacgccttgctgaagggaaatcgatcaatatttacaccgactcacgctatgcattcgccacggcacatgtacacggtgccatctacaaacaacgtggtttgttaacttctgctggccgcgagattaagaacaaagaagaaatcctttccttacttgaagccttacacctccccaaacgtctcgctattattcattgtccagggcatcagaaagcaaaagatcctatcagccgtgggaatcaaatggcagatcgtgtcgctaaacaggcagcccaaggcgttaacttgttgcccatgattgagacccctaaagctcca

SEQ ID NO: 64 - protein, 687 aa, synthetic construct
  REGION 1..687: note = Engineered reverse transcriptase variants
MHHHHHHGGSGVLTLQLDDEYRLYSPLVKPDQNIQFWLEQFPQAWAETGGMGLAKQVPPQVIQLKASATPVSVRQYPLSKEAQEGIRPHVQRLIQQGILVPVQSPWNTPLLPVKKPGTNDYRPVQDLREVNKRVQDIHPTVPNPYNLLCALPPQRSWYTVLDLKDAFFCLRLHPTSQPLFAFEWRDPDTGRTGQLTWTRLPQGFKNSPTIFDEALRRDLANFRIQHPQVTLLQYVDDLLLAGATKQDCLEGTKALLLELSDLGYRVSAKKAQICRREVTYLGYSLRDGQRWLTEARKKTVVQIPAPKTPKQMREFLGTAGFCRLWIPGFAELAAPLYPLTKEKGEFSWAPEHQKAFDAIKKALLSAPALALPDVTKPFTLYVDERKGVARGVLTQTLGPWRRPVAYLSKKLDPVASGWPVCLKAIAAVAILVKDADKLTLGQNITVIAPHALENIVRQPPDRWMTNARMTHYQSLLLTERVTFAPPAALNPATLLPEETDEPVTHDCHQLLIEETGVRKDLTDIPLTGEVLTWFTDGSSYVVEGKRMAGAAVVDGTRTIWASSLPEGTSAQKAELMALTQALRLAEGKSINIYTDSRYAFATAHVHGAIYKQRGLLTSAGREIKNKEEILSLLEALHLPKRLAIIHCPGHQKAKDPISRGNQMADRVAKQAAQGVNLLPMIETPKAP

SEQ ID NO: 65 - DNA, 2061 bp, synthetic construct
  misc_feature 1..2061: note = Engineered reverse transcriptase variants
  source 1..2061: mol_type = other DNA
atgcatcaccatcaccatcatggtggtagcggagtgctgacccttcagctggatgatgaatatcgcttgtacagtccgctggtcaaaccagaccaaaacattcagttctggctcgaacagtttccgcaagcgtgggctgaaactggtggcatgggcctggccaaacaggttcctcctcaggtaatccagttaaaggcatctgccacgccggtgtcagttcgtcagtatccgctgtcgaaagaagcgcaagaggggattcgcccacacattcagcgtttgatccagcagggcattctggtaccggttcaaagcccctggaataccccgcttttaccagtccgtaaaccgggtacaaacgattaccgtcctgtgcaagacctgcgcgaagtcaataaacgtgtgcaggatatccacccaaccgttccgaacccgtataatctgttgtgcgcgttaccgccgcagcgttcctggtacacggtgctggacctgaaggacgcgttcttctgtcttcgcctcgcacccaccagccagccactgtttgcctttgaatggcgcgatcctgatacgggccgtactgggcaattaacatggacccgtttgccgcagggctttaagaacagtcccaccatttttgatgaggctcttcgtcgcgacctcgcaaatttccgcatccaacacccacaggtaacgttactccagtatgtcgatgatcttttgttagcgggtgccaccaaacaggactgcttggaaggaacgaaagcacttctcttggaactctcggatttaggttatcgtgtgtccgccaagaaagctcagatttgtcgccgcgaagtgacatacttaggctattcattgcgtgatggtcaacgttggcttactgaggcgcgcaagaagaccgttgttcaaatccccgcccctaagaccgcgaaacagatgcgtgaatttcttggcacggcaggtttttgccgtttgtggattcctggctttgctacgttagcggcacccctctatccactcacgaaagagaaaggagaattctcttgggccccagaacatcagaaagcgtttgacgccatcaagaaagcgttattaagcgctcctgctcttgcattgcccgatgtcaccaaaccattcacgctctacgtggatgaacgcaaaggcgtagcccgcggtgtgttgacacagaccttaggaccttggcgtcgtcccgtggcctacctctcgaagaaacttgacccagttgcaagtggttggcctgtctgcttgaaagctattgccgcagttgcaatcctcgtcaaagatgccgacaaacttactttgggccagaacattactgttattgcaccacacgcccttgaaaacatcgttcgtcagccacctgatcgctggatgaccaatgctcgcatgacgcattatcagagcctcttgcttaccgaacgcgtgacttttgctccacctgcagccttaaaccccgcaacccttttacccgaagaaacagatgagcctgtgacgcatgactgtcaccagctcttgattgaagaaactggcgtacgcaaagacctcaccgatattccattaacaggtgaggtacttacgtggtttaccgacgggtcctcttatgtcgtcgaaggcaaacgtatggctggtgccgccgttgttgatggcacccgtactatctgggcaagcagcttacccgaaggcacgagtgctcagaaagcagagttgatggccttgacccaagccttacgccttgctgaagggaaatcgatcaatatttacaccgactcacgctatgcattcgccacggcacatgtacacggtgccatctacaaacaacgtggtttgttaacttctgctggccgcgagattaagaacaaagaagaaatcctttccttacttgaagccttacacctccccaaacgtctcgctattattcattgtccagggcatcagaaagcaaaagatcctatcagccgtgggaatcaaatggcagatcgtgtcgctaaacaggcagcccaaggcgttaacttgttgcccatgattgagacccctaaagctcca

SEQ ID NO: 66 - protein, 687 aa, synthetic construct
  REGION 1..687: note = Engineered reverse transcriptase variants
MHHHHHHGGSGVLTLQLDDEYRLYSPLVKPDQNIQFWLEQFPQAWAETGGMGLAKQVPPQVIQLKASATPVSVRQYPLSKEAQEGIRPHIQRLIQQGILVPVQSPWNTPLLPVRKPGTNDYRPVQDLREVNKRVQDIHPTVPNPYNLLCALPPQRSWYTVLDLKDAFFCLRLAPTSQPLFAFEWRDPDTGRTGQLTWTRLPQGFKNSPTIFDEALRRDLANFRIQHPQVTLLQYVDDLLLAGATKQDCLEGTKALLLELSDLGYRVSAKKAQICRREVTYLGYSLRDGQRWLTEARKKTVVQIPAPKTAKQMREFLGTAGFCRLWIPGFATLAAPLYPLTKEKGEFSWAPEHQKAFDAIKKALLSAPALALPDVTKPFTLYVDERKGVARGVLTQTLGPWRRPVAYLSKKLDPVASGWPVCLKAIAAVAILVKDADKLTLGQNITVIAPHALENIVRQPPDRWMTNARMTHYQSLLLTERVTFAPPAALNPATLLPEETDEPVTHDCHQLLIEETGVRKDLTDIPLTGEVLTWFTDGSSYVVEGKRMAGAAVVDGTRTIWASSLPEGTSAQKAELMALTQALRLAEGKSINIYTDSRYAFATAHVHGAIYKQRGLLTSAGREIKNKEEILSLLEALHLPKRLAIIHCPGHQKAKDPISRGNQMADRVAKQAAQGVNLLPMIETPKAP

SEQ ID NO: 67 - DNA, 2061 bp, synthetic construct
  misc_feature 1..2061: note = Engineered reverse transcriptase variants
  source 1..2061: mol_type = other DNA
atgcatcaccatcaccatcatggtggtagcggagtgctgacccttcagctggatgatgaatatcgcttgtacagtccgctggtcaaaccagaccaaaacattcagttctggctcgaacagtttccgcaagcgtgggctgaaactgcaggcatgggcctggccaaacaggttcctcctcaggtaatcccgttaaaggcatcttcgacgccggtgtcagttcgtcagtatccgctgtcgaaaaaggcgcaagaggggattcgcccacacgtgcagcgtttgatccagcagggcattctggtaccggttcaaagcccctggaataccccgcttttaccagtccgcaaaccgggtacaaacgattaccgtcctgtgcaagacctgcgcgaagtcaataaacgtgtgcaggatatccacccaaccgttccgaacccgtataatctgttgtgcgcgttaccgccgcagcgttcctggtacacggtgctggacctgaaggacgcgtacttctgtcttcgcctccaccccaccagccagccactgtttgcctttgaatggcgcgatcctgatacgggccgtactgggcaattaacatggacccgtttgccgcagggctttaagaacagtcccaccatttttgatgaggctcttcaccgcgacctcgcaaatttccgcatccaacacccacaggtaacgttactccagtatgtcgatgatcttttgttagcgggtgccaccaaacaggactgcttggaaggaacgaaagcacttctcttggaactctcggacttaggttatcgtgtgtccgccaagaaagctcagatttgtcgccgcgaagtgacatacttaggctattcattgcgtgatggtcaacgttggcttactgaggcgcgcaagaagaccgttgttcaaatccccgcccctaccaccgcgaaacagatgcgcgcgtttcttggcacggcaggtttctgccgtttgtggattcctggctttgctaccttagcggcacccctctatccactcacgaaagagaaaggagaattctcttgggccccagaacatcagaaagcgtttgacgccatcaagaaagcgttattaagcgctcctgctcttgcattgcccgatgtcaccaaaccattcacgctctacgtggatgaacgcaaaggcgtagcccgcggtgtgttgacacagaccttaggaccttggcgtcgtcccgtggcctacctctcgaagaaacttgacccagttgcaagtggttggcctgtctgcttgaaagctattgccgcagttgcaatcctcgtcaaagatgccgacaaacttactttgggccagaacattactgttggcgcaccacacgcccttgaaaacatcgttcgtcagccacctgatcgctggatgaccaatgctcgcatgacgcattatcagagcctcttgcttaccgaacgcgtgacttttgctccacctgcagccttaaaccccgcaacccttttacccgaagaaacagatgagcctgtgacgcatgactgtcaccagctcttgattgaagaaactggcgtacgcaaagacctcaccgatattccattaacaggtgaggtacttacgtggtttaccgacgggtcctcttatgtcgtcgaaggcaaacgtatggctggtgccgccgttgttgatggcacccgtactatctgggcaagcagcttacccgaaggcacgagtgctcagaaagcacaattgatggccttgacccaagccttacgccttgctgaagggaaatcgatcaatatttacaccgactcacgctatgcattcgccacggcacatgtacacggtgccatctacaaacaacgtggtttgttaacttctgctggccgcgagattaagaacaaagaagaaatcctttccttacttgaagccttacacctccccaaacgtctcgctattattcattgtccagggcatcagaaagcaaaagatcctatcagccgtgggaatcaaatggcagatcgtgtcgctaaacaggcagcccaaggcgttaacttgttgcccatgattgagacccctaaagctcca

SEQ ID NO: 68 - protein, 687 aa, synthetic construct
  REGION 1..687: note = Engineered reverse transcriptase variants
MHHHHHHGGSGVLTLQLDDEYRLYSPLVKPDQNIQFWLEQFPQAWAETAGMGLAKQVPPQVIPLKASSTPVSVRQYPLSKKAQEGIRPHVQRLIQQGILVPVQSPWNTPLLPVRKPGTNDYRPVQDLREVNKRVQDIHPTVPNPYNLLCALPPQRSWYTVLDLKDAYFCLRLHPTSQPLFAFEWRDPDTGRTGQLTWTRLPQGFKNSPTIFDEALHRDLANFRIQHPQVTLLQYVDDLLLAGATKQDCLEGTKALLLELSDLGYRVSAKKAQICRREVTYLGYSLRDGQRWLTEARKKTVVQIPAPTTAKQMRAFLGTAGFCRLWIPGFATLAAPLYPLTKEKGEFSWAPEHQKAFDAIKKALLSAPALALPDVTKPFTLYVDERKGVARGVLTQTLGPWRRPVAYLSKKLDPVASGWPVCLKAIAAVAILVKDADKLTLGQNITVGAPHALENIVRQPPDRWMTNARMTHYQSLLLTERVTFAPPAALNPATLLPEETDEPVTHDCHQLLIEETGVRKDLTDIPLTGEVLTWFTDGSSYVVEGKRMAGAAVVDGTRTIWASSLPEGTSAQKAQLMALTQALRLAEGKSINIYTDSRYAFATAHVHGAIYKQRGLLTSAGREIKNKEEILSLLEALHLPKRLAIIHCPGHQKAKDPISRGNQMADRVAKQAAQGVNLLPMIETPKAP

SEQ ID NO: 69 - DNA, 2061 bp, synthetic construct
  misc_feature 1..2061: note = Engineered reverse transcriptase variants
  source 1..2061: mol_type = other DNA
atgcatcaccatcaccatcatggtggtagcggagtgctgacccttcagctggatgatgaatatcgcttgtacagtccgctggtcaaaccagaccaaaacattcagttctggctcgaacagtttccgcaagcgtgggctgaaactggtggcatgggcctggccaaacaggttcctcctcaggtaatccaattaaaggcatctgccacgccggtgtcagttcgtcagtatccgctgtcgaaagaagcgcaagaggggattcgcccacacgttcagcgtttgatccagcagggcattctggtaccggttcaaagcccctggaataccccgcttttaccagtccgtaaaccgggtacaaacgattaccgtcctgtgcaagacctgcgcgaagtcaataaacgtgtgcaggatatccacccaaccgttccgaacccgtataatctgttgtgcgcgttaccgccgcagcgttcctggtacacggtgctggacctgaaggacgcgttcttctgtcttcgcctccatcccaccagccagccactgtttgcctttgaatggcgcgatcctgatacgggccgtactgggcaattaacatggacccgtttgccgcagggctttaagaacagtcccacgctgtttgatgaggctcttcatcgcgacctcgcaaatttccgcatccaacacccacaggtaacgttactccagtatgtcgatgatcttttgttagcgggtgccaccaaacaggactgcttggaaggaacgaaagcacttctcttggaactctcggatttaggttatcgtgtgtccgccaagaaagctcagatttgtcgccgcgaagtgacatacttaggctattcattgcgtgatggtcaacgttggcttactgaggcgcgcaagaagaccgttgttcaaatccccgcccctaagaccccgaaacagatgcgtgaatttcttggcacggcaggtgcgtgccgtttgtggattcctggctttgctacgttagcggcacccctctatccactcacgaaagagaaaggagaattctcttgggctccagaacatcagaaagcgtttgacgccatcaagaaagcgttattaagcgctcctgctcttgcattgcccgatgtcaccaaaccattcacgctctacgtggatgaacgcaaaggcgtagcccgcggtgtgttgacacagaccttaggaccttggcgtcgtcccgtggcctacctctcgaagaaacttgacccagttgcaagtggttggcctgtctgcttgaaagctattgccgcagttgcaatcctcgtcaaagatgccgacaaacttactttgggccagaacattactgttattgcaccacacgcccttgaaaacatcgttcgtcagccacctgatcgctggatgaccaatgctcgcatgacgcattatcagagcctcttgcttaccgaacgcgtgacttttgctccacctgcagccttaaaccccgcaacccttttacccgaagaaacagatgagcctgtgacgcatgactgtcaccagctcttgattgaagaaactggcgtacgcaaagacctcaccgatattccattaacaggtgaggtacttacgtggtttaccgaggggtcctcttatgtcgtcgaaggcaaacgtatggctggtgccgccgttgttgatggcacccgtactatctgggcaagcagcttacccgaaggcacgagtgctcagaaagcagatttgatggccttgacccaagccttacgccttgctgaagggaaatcgatcaatatttacaccgactcacgctatgcattcgccacggcacatgtacacggtgccatctacaaacaacgtggtttgttaacttctgctggccgcgagattaagaacaaagaagaaatcctttccttacttgaagccttacacctccccaaacgtctcgctattattcattgtccagggggtcagaaagcaaaagatcctatcagccgtgggaatcaaatggcagatcgtgtcgctaaacaggcagcccaaggcgttaacttgttgcccatgattgagacccctaaagctcca

SEQ ID NO: 70 - protein, 687 aa, synthetic construct
  REGION 1..687: note = Engineered reverse transcriptase variants
MHHHHHHGGSGVLTLQLDDEYRLYSPLVKPDQNIQFWLEQFPQAWAETGGMGLAKQVPPQVIQLKASATPVSVRQYPLSKEAQEGIRPHVQRLIQQGILVPVQSPWNTPLLPVRKPGTNDYRPVQDLREVNKRVQDIHPTVPNPYNLLCALPPQRSWYTVLDLKDAFFCLRLHPTSQPLFAFEWRDPDTGRTGQLTWTRLPQGFKNSPTLFDEALHRDLANFRIQHPQVTLLQYVDDLLLAGATKQDCLEGTKALLLELSDLGYRVSAKKAQICRREVTYLGYSLRDGQRWLTEARKKTVVQIPAPKTPKQMREFLGTAGACRLWIPGFATLAAPLYPLTKEKGEFSWAPEHQKAFDAIKKALLSAPALALPDVTKPFTLYVDERKGVARGVLTQTLGPWRRPVAYLSKKLDPVASGWPVCLKAIAAVAILVKDADKLTLGQNITVIAPHALENIVRQPPDRWMTNARMTHYQSLLLTERVTFAPPAALNPATLLPEETDEPVTHDCHQLLIEETGVRKDLTDIPLTGEVLTWFTEGSSYVVEGKRMAGAAVVDGTRTIWASSLPEGTSAQKADLMALTQALRLAEGKSINIYTDSRYAFATAHVHGAIYKQRGLLTSAGREIKNKEEILSLLEALHLPKRLAIIHCPGGQKAKDPISRGNQMADRVAKQAAQGVNLLPMIETPKAP

SEQ ID NO: 71 - DNA, 2061 bp, synthetic construct
  misc_feature 1..2061: note = Engineered reverse transcriptase variants
  source 1..2061: mol_type = other DNA
atgcatcaccatcaccatcatggtggtagcggagtgctgacccttcagctggatgatgaatatcgcttgtacagtccgctggtcaaaccagaccaaaacattcagttctggctcgaacagtttccgcaagcgtgggctgaaactgctggcatgggcctggccaaacaggttcctcctcaggtaatcctgttaaaggcatctgccacgccggtgtcagttcgtcagtatccgctgtcgaaagaagcgcaagaggggattcgcccacacattcagcgtttgatccagcagggcattctggtaccggttcaaagcccctggaataccccgcttttaccagtccgtaaaccgggtacaaacgattaccgtcctgtgcaagacctgcgcgaagtcaataaacgtgtgcaggatatccacccaaccgttccgaacccgtataatctgttgtgcgcgttaccgccgcagcgttcctggtacacggtgctggacctgaaggacgcgttcttctgtcttcgcctccaccccaccagccagccactgtttgcctttgaatggcgcgatcctgatacgggccgtactgggcaattaacatggacccgtttgccgcagggctttaagaacagtcccacgatctttgatgaggctcttcaccgcgacctcgcaaatttccgcatccaacacccacaggtaacgttactccagtatgtcgatgatcttttgttagcgggtgccaccaaacaggactgcttggaaggaacgaaagcacttctcttggaactctcggatttaggttatcgtgtgtccgccaagaaagctcagatttgtcgccgcgaagtgacatacttaggctattcattgcgtgatggtcaacgttggcttactgaggcgcgcaagaagaccgttgttcaaatccccgcccctaagaccgcgaaacagatgcgtgaatttcttggcacggcaggtgcgtgccgtttgtggattcctggctttgctgaattagcggcacccctctatccactcacgaaagagaaaggagaattctcttgggccccagaacatcagaaagcgtttgacgccatcaagaaagcgttattaagcgctcctgctcttgcattgcccgatgtcaccaaaccattcacgctctacgtggatgaacgcaaaggcgtagcccgcggtgtgttgacacagaccttaggaccttggcgtcgtcccgtggcctacctctcgaagaaacttgacccagttgcaagtggttggcctgtctgcttgaaagctattgccgcagttgcaatcctcgtcaaagatgccgacaaacttactttgggccagaacattactgttattgcaccacacgcccttgaaaacatcgttcgtcagccacctgatcgctggatgaccaatgctcgcatgacgcattatcagagcctcttgcttaccgaacgcgtgacttttgctccacctgcagccttaaaccccgcaacccttttacccgaagaaacagatgagcctgtgacgcatgactgtcaccagctcttgattgaagaaactggcgtacgcaaagacctcaccgatattccattaacaggtgaggtacttacgtggtttaccgattggtcctcttatgtcgtcgaaggcaaacgtatggctggtgccgccgttgttgatggcacccgtactatctgggcaagcagcttacccgaaggcacgagtgctcagaaagcagagttgatggccttgacccaagccttacgccttgctgaagggaaatcgatcaatatttacaccgactcacgcagcgcattcgccacggcacatgtacacggtgccatctacaaacaacgtggtttgttaacttctgctggccgcgagattaagaacaaagaagaaatcctttccttacttgaagccttacacctccccaaacgtctcgctattattcattgtccagggcatcagaaagcaaaagatcctatcagccgtgggaatcaaatggcagatcgtgtcgctaaacaggcagcccaaggcgttaacttgttgcccatgattgagacccctaaagctcca

SEQ ID NO: 72 - protein, 687 aa, synthetic construct
  REGION 1..687: note = Engineered reverse transcriptase variants
MHHHHHHGGSGVLTLQLDDEYRLYSPLVKPDQNIQFWLEQFPQAWAETAGMGLAKQVPPQVILLKASATPVSVRQYPLSKEAQEGIRPHIQRLIQQGILVPVQSPWNTPLLPVRKPGTNDYRPVQDLREVNKRVQDIHPTVPNPYNLLCALPPQRSWYTVLDLKDAFFCLRLHPTSQPLFAFEWRDPDTGRTGQLTWTRLPQGFKNSPTIFDEALHRDLANFRIQHPQVTLLQYVDDLLLAGATKQDCLEGTKALLLELSDLGYRVSAKKAQICRREVTYLGYSLRDGQRWLTEARKKTVVQIPAPKTAKQMREFLGTAGACRLWIPGFAELAAPLYPLTKEKGEFSWAPEHQKAFDAIKKALLSAPALALPDVTKPFTLYVDERKGVARGVLTQTLGPWRRPVAYLSKKLDPVASGWPVCLKAIAAVAILVKDADKLTLGQNITVIAPHALENIVRQPPDRWMTNARMTHYQSLLLTERVTFAPPAALNPATLLPEETDEPVTHDCHQLLIEETGVRKDLTDIPLTGEVLTWFTDWSSYVVEGKRMAGAAVVDGTRTIWASSLPEGTSAQKAELMALTQALRLAEGKSINIYTDSRSAFATAHVHGAIYKQRGLLTSAGREIKNKEEILSLLEALHLPKRLAIIHCPGHQKAKDPISRGNQMADRVAKQAAQGVNLLPMIETPKAP

SEQ ID NO: 73 - DNA, 2061 bp, synthetic construct
  misc_feature 1..2061: note = Engineered reverse transcriptase variants
  source 1..2061: mol_type = other DNA
atgcatcaccatcaccatcatggtggtagcggagtgctgacccttcagctggatgatgaatatcgcttgtacagtccgctggtcaaaccagaccaaaacattcagttctggctcgaacagtttccgcaagcgtgggctgaaactgcaggcatgggcctggccaaacaggttcctcctcaggtaatccaattaaaggcatctgccacgccggtgtcagttcgtcagtatccgctgtcgaaagaagcgcaagaggggattcgcccacacgtgcagcgtttgatccagcagggcattctggtaccggttcaaagcccctggaataccccgcttttaccagtccgcaaaccgggtacaaacgattaccgtcctgtgcaagacctgcgcgaagtcaataaacgtgtgcaggatatccacccaaccgttccgaacccgtataatctgttgtgcgcgttaccgccgcagcgttcctggtacacggtgctggacctgaaggacgcgttcttctgtcttcgcctccaccccaccagccagccactgtttgcctttgaatggcgcgatcctgatacgggccgtactgggcaattaacatggacccgtttgccgcagggctttaagaacagtcccaccatttttgatgaggctcttcaccgcgacctcgcaaatttccgcatccaacacccacaggtaacgttactccagtatgtcgatgatcttttgttagcgggtgccaccaaacaggactgcttggaaggaacgaaagcacttctcttggaactctcggatttaggttatcgtgtgtccgccaagaaagctcagatttgtcgccgcgaagtgacatacttaggctattcattgcgtgatggtcaacgttggcttactgaggcgcgcaagaagaccgttgttcaaatccccgcccctaccaccgcgaaacagatgcgtgaatttcttggcacggcaggtttctgccgtttgtggattcctggctttgctaccttagcggcacccctctatccactcacgaaagagaaaggagaattctcttgggccccagaacatcagaaagcgtttgacgccatcaagaaagcgttattaagcgctcctgctcttgggttgcccgatgtcaccaaaccattcacgctctacgtggatgaacgcaaaggcgtagcccgcggtgtgttgacacagaccttaggaccttggcgtcgtcccgtggcctacctctcgaagaaacttgacccagttgcaagtggttggcctgtctgcttgaaagctattgccgcagttgcaatcctcgtcaaagatgccgacaaacttactttgggccagaacattactgttattgcaccacacgcccttgaaaacatcgttcgtcagccacctgatcgctggctgtcgaatgctcgcatgacgcattatcagagcctcttgcttaccgaacgcgtgacttttgctccacctgcagccttaaaccccgcaacccttttacccgaagaaacagatgagcctgtgacgcatgactgtcacgagctcttgattgaagaaactggcgtacgcaaagacctcaccgatattccattaacaggtgaggtacttacgtggtttaccgatgggtcctcttatgtcgtcgaaggcaaacgtatggctggtgccgccgttgttactggcacccgtactatctgggcaagcagcttacccgaaggcacgagtgctcagaaagcagagttgattgccttgacccaagccttacgccttgctgaagggaaatcgatcaatatttacaccgactcacgctatgcattcgccacggcacatgtacacggtgccatctacaaacaacgtggtttgttaacttctgctggccgcgagattaagaacaaagaagaaatcctttccttacttgaagccttacacctccccaaacgtctcgctattattcattgtccagggcatcagaaagcaaaagatcctatcagccgtgggaatcaaatggcagatcgtgtcgctaaacaggcagcccaaggcgttaacttgttgcccatgattgagacccctaaagctcca

SEQ ID NO: 74 - protein, 687 aa, synthetic construct
  REGION 1..687: note = Engineered reverse transcriptase variants
MHHHHHHGGSGVLTLQLDDEYRLYSPLVKPDQNIQFWLEQFPQAWAETAGMGLAKQVPPQVIQLKASATPVSVRQYPLSKEAQEGIRPHVQRLIQQGILVPVQSPWNTPLLPVRKPGTNDYRPVQDLREVNKRVQDIHPTVPNPYNLLCALPPQRSWYTVLDLKDAFFCLRLHPTSQPLFAFEWRDPDTGRTGQLTWTRLPQGFKNSPTIFDEALHRDLANFRIQHPQVTLLQYVDDLLLAGATKQDCLEGTKALLLELSDLGYRVSAKKAQICRREVTYLGYSLRDGQRWLTEARKKTVVQIPAPTTAKQMREFLGTAGFCRLWIPGFATLAAPLYPLTKEKGEFSWAPEHQKAFDAIKKALLSAPALGLPDVTKPFTLYVDERKGVARGVLTQTLGPWRRPVAYLSKKLDPVASGWPVCLKAIAAVAILVKDADKLTLGQNITVIAPHALENIVRQPPDRWLSNARMTHYQSLLLTERVTFAPPAALNPATLLPEETDEPVTHDCHELLIEETGVRKDLTDIPLTGEVLTWFTDGSSYVVEGKRMAGAAVVTGTRTIWASSLPEGTSAQKAELIALTQALRLAEGKSINIYTDSRYAFATAHVHGAIYKQRGLLTSAGREIKNKEEILSLLEALHLPKRLAIIHCPGHQKAKDPISRGNQMADRVAKQAAQGVNLLPMIETPKAP

SEQ ID NO: 75 - DNA, 2061 bp, synthetic construct
  misc_feature 1..2061: note = Engineered reverse transcriptase variants
  source 1..2061: mol_type = other DNA
atgcatcaccatcaccatcatggtggtagcggagtgctgacccttcagctggatgatgaatatcgcttgtacagtccgctggtcaaaccagaccaaaacattcagttctggctcgaacagtttccgcaagcgtgggctgaaactggtggcatgggcctggccaaacaggttcctcctcaggtaatccaattaaaggcatctgccacgccggtgtcagttcgtcagtatccgctgtcgaaagaagcgcaagaggggattcgcccacacgttcagcgtttgatccagcagggcattctggtaccggttcaaagcccctggaataccccgcttttaccagtcaaaaaaccgggtacaaacgattaccgtcctgtgcaagacctgcgcgaagtcaataaacgtgtgcaggatatccacccaaccgttccgaacccgtataatctgttgtgcgcgttaccgccgcagcgttcctggtacacggtgctggacctgaaggacgcgttcttctgtcttcgcctcgcacccaccagccagccactgtttgcctttgaatggcgcgatcctgatacgggccgtactgggcaattaacatggacccgtttgccgcagggctttaagaacagtcccaccatttttgatgaggctcttcgtcgcgacctcgcaaatttccgcatccaacacccacaggtaacgttactccagtatgtcgatgatcttttgttagcgggtgccaccaaacaggactgcttggaaggaacgaaagcacttctcttggaactctcggatttaggttatcgtgtgtccgccaagaaagctcagatttgtcgccgcgaagtgacatacttaggctattcattgcgtgatggtcaacgttggcttactgaggcgcgcaagaagaccgttgttcaaatccccgcccctacgaccgcgaaacagatgcgtgaatttcttggcacggcaggtgcgtgccgtttgtggattcctggctttgctacgttagcggcacccctctatccactcacgaaagagaaaggagaattctcttgggccccagaacatcagaaagcgtttgacgccatcaagaaagcgttattaagcgctcctgctcttgcattgcccgatgtcaccaaaccattcacgctctacgtggatgaacgcaaaggcgtagcccgcggtgtgttgacacagaccttaggaccttggcgtcgtcccgtggcctacctctcgaagaaacttgacccagttgcaagtggttggcctgtctgcttgaaagctattgccgcagttgcaatcctcgtcaaagatgccgacaaacttactttgggccagaacattactgttattgcaccacacgcccttgaaaacatcgttcgtcagccacctgatcgctggatgaccaatgctcgcatgacgcattatcagagcctcttgcttaccgaacgcgtgacttttgctccacctgcagccttaaaccccgcaacccttttacccgaagaaacagatgagcctgtgacgcatgactgtcaccagctcttgattgaagaaactggcgtacgcaaagacctcaccgatattccattaacaggtgaggtacttacgtggtttaccgacgggtcctcttatgtcgtcgaaggcaaacgtatggctggtgccgccgttgttgatggcacccgtactatctgggcaagcagcttacccgaaggcacgagtgctcagaaagcagatttgatggccttgacccaagccttacgccttgctgaagggaaatcgatcaatatttacaccgactcacgcagcgcattcgccacggcacatgtacacggtgccatctacaaacaacgtggtttgttaacttctgctggccgcgagattaagaacaaagaagaaatcctttccttacttgaagccttacacctccccaaacgtctcgctattattcattgtccagggcatcagaaagcaaaagatcctatcagccgtgggaatcaaatggcagatcgtgtcgctaaacaggcagcccaaggcgttaacttgttgcccatgattgagacccctaaagctcca

SEQ ID NO: 76 - protein, 687 aa, synthetic construct
  REGION 1..687: note = Engineered reverse transcriptase variants
MHHHHHHGGSGVLTLQLDDEYRLYSPLVKPDQNIQFWLEQFPQAWAETGGMGLAKQVPPQVIQLKASATPVSVRQYPLSKEAQEGIRPHVQRLIQQGILVPVQSPWNTPLLPVKKPGTNDYRPVQDLREVNKRVQDIHPTVPNPYNLLCALPPQRSWYTVLDLKDAFFCLRLAPTSQPLFAFEWRDPDTGRTGQLTWTRLPQGFKNSPTIFDEALRRDLANFRIQHPQVTLLQYVDDLLLAGATKQDCLEGTKALLLELSDLGYRVSAKKAQICRREVTYLGYSLRDGQRWLTEARKKTVVQIPAPTTAKQMREFLGTAGACRLWIPGFATLAAPLYPLTKEKGEFSWAPEHQKAFDAIKKALLSAPALALPDVTKPFTLYVDERKGVARGVLTQTLGPWRRPVAYLSKKLDPVASGWPVCLKAIAAVAILVKDADKLTLGQNITVIAPHALENIVRQPPDRWMTNARMTHYQSLLLTERVTFAPPAALNPATLLPEETDEPVTHDCHQLLIEETGVRKDLTDIPLTGEVLTWFTDGSSYVVEGKRMAGAAVVDGTRTIWASSLPEGTSAQKADLMALTQALRLAEGKSINIYTDSRSAFATAHVHGAIYKQRGLLTSAGREIKNKEEILSLLEALHLPKRLAIIHCPGHQKAKDPISRGNQMADRVAKQAAQGVNLLPMIETPKAP

SEQ ID NO: 77 - DNA, 2061 bp, synthetic construct
  misc_feature 1..2061: note = Engineered reverse transcriptase variants
  source 1..2061: mol_type = other DNA
atgcatcaccatcaccatcatggtggtagcggagtgctgacccttcagctggatgatgaatatcgcttgtacagtccgctggtcaaaccagaccaaaacattcagttctggctcgaacagtttccgcaagcgtgggctgaaactgctggcatgggcctggccaaacaggttcctcctcaggtaatccaattaaaggcatctgccacgccggtgtcagttcgtcagtatccgctgtcgaaagaagcgcaagaggggattcgcccacacattcagcgtttgatccagcagggcattctggtaccggttcaaagcccctggaataccccgcttttaccagtccgcaaaccgggtacaaacgattaccgtcctgtgcaagacctgcgcgaagtcaataaacgtgtgcaggatatccacccaaccgttccgaacccgtataatctgttgtgcgcgttaccgccgcagcgttcctggtacacggtgctggacctgaaggacgcgttcttctgtcttcgcctccatcccaccagccagccactgtttgcctttgaatggcgcgatcctgatacgggccgtactgggcaattaacatggacccgtttgccgcagggctttaagaacagtcccaccatttttgatgaggctcttcgtcgcgacctcgcaaatttccgcatccaacacccacaggtaacgttactccagtatgtcgatgatcttttgttagcgggtgccaccaaacaggactgcttggaaggaacgaaagcacttctcttggaactctcggatttaggttatcgtgtgtccgccaagaaagctcagatttgtcgccgcgaagtgacatacttaggctattcattgcgtgatggtcaacgttggcttactgaggcgcgcaagaagaccgttgttcaaatccccgcccctaccaccgcgaaacagatgcgtgaatttcttggcacggcaggtgcgtgccgtttgtggattcctggctttgctacgttagcggcacccctctatccactcacgaaagagaaaggagaattctcttgggccccagaacatcagaaagcgtttgacgccatcaagaaagcgttattaagcgctcctgctcttgcattgcccgatgtcaccaaaccattcacgctctacgtggatgaacgcaaaggcgtagcccgcggtgtgttgacacagaccttaggaccttggcgtcgtcccgtggcctacctctcgaagaaacttgacccagttgcaagtggttggcctgtctgcttgaaagctattgccgcagttgcaatcctcgtcaaagatgccgacaaacttactttgggccagaacattactgttattgcaccacacgcccttgaaaacatcgttcgtcagccacctgatcgctggatgaccaatgctcgcatgacgcattatcagagcctcttgcttaccgaacgcgtgacttttgctccacctgcagccttaaaccccgcaacccttttacccgaagaaacagatgagcctgtgacgcatgactgtcaccagctcttgattgaagaaactggcgtacgcaaagacctcaccgatattccattaacaggtgaggtacttacgtggtttaccgatgggtcctcttatgtcgtcgaaggcaaacgtatggctggtgccgccgttgttgatggcacccgtactatctgggcaagcagcttacccgaaggcacgagtgctcagaaagcagagttgatggccttgacccaagccttacgccttgctgaagggaaatcgatcaatatttacaccgactcacgctatgcattcgccacggcacatgtacacggtgccatctacaaacaacgtggtttgttaacttctgctggccgcgagattaagaacaaagaagaaatcctttccttacttgaagccttacacctccccaaacgtctcgctattattcattgtccagggggtcagaaagcaaaagatcctatcagccgtgggaatcaaatggcagatcgtgtcgctaaacaggcagcccaaggcgttaacttgttgcccatgattgagacccctaaagctcca

SEQ ID NO: 78 - protein, 687 aa, synthetic construct
  REGION 1..687: note = Engineered reverse transcriptase variants
MHHHHHHGGSGVLTLQLDDEYRLYSPLVKPDQNIQFWLEQFPQAWAETAGMGLAKQVPPQVIQLKASATPVSVRQYPLSKEAQEGIRPHIQRLIQQGILVPVQSPWNTPLLPVRKPGTNDYRPVQDLREVNKRVQDIHPTVPNPYNLLCALPPQRSWYTVLDLKDAFFCLRLHPTSQPLFAFEWRDPDTGRTGQLTWTRLPQGFKNSPTIFDEALRRDLANFRIQHPQVTLLQYVDDLLLAGATKQDCLEGTKALLLELSDLGYRVSAKKAQICRREVTYLGYSLRDGQRWLTEARKKTVVQIPAPTTAKQMREFLGTAGACRLWIPGFATLAAPLYPLTKEKGEFSWAPEHQKAFDAIKKALLSAPALALPDVTKPFTLYVDERKGVARGVLTQTLGPWRRPVAYLSKKLDPVASGWPVCLKAIAAVAILVKDADKLTLGQNITVIAPHALENIVRQPPDRWMTNARMTHYQSLLLTERVTFAPPAALNPATLLPEETDEPVTHDCHQLLIEETGVRKDLTDIPLTGEVLTWFTDGSSYVVEGKRMAGAAVVDGTRTIWASSLPEGTSAQKAELMALTQALRLAEGKSINIYTDSRYAFATAHVHGAIYKQRGLLTSAGREIKNKEEILSLLEALHLPKRLAIIHCPGGQKAKDPISRGNQMADRVAKQAAQGVNLLPMIETPKAP

SEQ ID NO: 79 - DNA, 2061 bp, synthetic construct
  misc_feature 1..2061: note = Engineered reverse transcriptase variants
  source 1..2061: mol_type = other DNA
atgcatcaccatcaccatcatggtggtagcggagtgctgacccttcagctggatgatgaatatcgcttgtacagtccgctggtcaaaccagaccaaaacattcagttctggctcgaacagtttccgcaagcgtgggctgaaactgctggcatgggcctggccaaacaggttcctcctcaggtaatccaattaaaggcatctgccacgccggtgtcagttcgtcagtatccgctgtcgaaagaagcgcaagaggggattcgcccacacgtgcagcgtttgatccagcagggcattctggtaccggttcaaagcccctggaataccccgcttttaccagtccgcaaaccgggtacaaacgattaccgtcctgtgcaagacctgcgcgaagtcaataaacgtgtgcaggatatccacccaaccgttccgaacccgtataatctgttgtgcgcgttaccgccgcagcgttcctggtacacggtgctggacctgaaggacgcgttcttctgtcttcgcctccaccccaccagccagccactgtttgcctttgaatggcgcgatcctgatacgggccgtactgggcaattaacatggacccgtttgccgcagggctttaagaacagtcccacgatctttgatgaggctcttcaccgcgacctcgcaaatttccgcatccaacacccacaggtaacgttactccagtatgtcgatgatcttttgttagcgggtgccaccaaacaggactgcttggaaggaacgaaagcacttctcttggaactctcggatttaggttatcgtgtgtccgccaagaaagctcagatttgtcgccgcgaagtgacatacttaggctattcattgcgtgatggtcaacgttggcttactgaggcgcgcaagaagaccgttgttcaaatccccgcccctacgaccgcgaaacagatgcgtgaatttcttggcacggcaggtttctgccgtttgtggattcctggctttgctaccttagcggcacccctctatccactcacgaaagagaaaggagaattctcttgggccccagaacatcagaaagcgtttgacgccatcaagaaagcgttattaagcgctcctgctcttgcattgcccgatgtcaccaaaccattcacgctctacgtggatgaacgcaaaggcgtagcccgcggtgtgttgacacagaccttaggaccttggcgtcgtcccgtggcctacctctcgaagaaacttgacccagttgcaagtggttggcctgtctgcttgaaagctattgccgcagttgcaatcctcgtcaaagatgccgacaaacttactttgggccagaacattactgttattgcaccacacgcccttgaaaacatcgttcgtcagccacctgatcgctggatgaccaatgctcgcatgacgcattatcagagcctcttgcttaccgaacgcgtgacttttgctccacctgcagccttaaaccccgcaacccttttacccgaagaaacagatgagcctgtgacgcatgactgtcaccagctcttgattgaagaaactggcgtacgcaaagacctcaccgatattccattaacaggtgaggtacttacgtggtttaccgatgggtcctcttatgtcgtcgaaggcaaacgtatggctggtgccgccgttgttgatggcacccgtactatctgggcaagcagcttacccgaaggcacgagtgctcagaaagcagatttgatggccttgacccaagccttacgccttgctgaagggaaatcgatcaatatttacaccgactcacgctatgcattcgccacggcacatgtacacggtgccatctacaaacaacgtggtttgttaacttctgctggccgcgagattaagaacaaagaagaaatcctttccttacttgaagccttacacctccccaaacgtctcgctattattcattgtccagggggtcagaaagcaaaagatcctatcagccgtgggaatcaaatggcagatcgtgtcgctaaacaggcagcccaaggcgttaacttgttgcccatgattgagacccctaaagctcca

SEQ ID NO: 80 - protein, 687 aa, synthetic construct
  REGION 1..687: note = Engineered reverse transcriptase variants
MHHHHHHGGSGVLTLQLDDEYRLYSPLVKPDQNIQFWLEQFPQAWAETAGMGLAKQVPPQVIQLKASATPVSVRQYPLSKEAQEGIRPHVQRLIQQGILVPVQSPWNTPLLPVRKPGTNDYRPVQDLREVNKRVQDIHPTVPNPYNLLCALPPQRSWYTVLDLKDAFFCLRLHPTSQPLFAFEWRDPDTGRTGQLTWTRLPQGFKNSPTIFDEALHRDLANFRIQHPQVTLLQYVDDLLLAGATKQDCLEGTKALLLELSDLGYRVSAKKAQICRREVTYLGYSLRDGQRWLTEARKKTVVQIPAPTTAKQMREFLGTAGFCRLWIPGFATLAAPLYPLTKEKGEFSWAPEHQKAFDAIKKALLSAPALALPDVTKPFTLYVDERKGVARGVLTQTLGPWRRPVAYLSKKLDPVASGWPVCLKAIAAVAILVKDADKLTLGQNITVIAPHALENIVRQPPDRWMTNARMTHYQSLLLTERVTFAPPAALNPATLLPEETDEPVTHDCHQLLIEETGVRKDLTDIPLTGEVLTWFTDGSSYVVEGKRMAGAAVVDGTRTIWASSLPEGTSAQKADLMALTQALRLAEGKSINIYTDSRYAFATAHVHGAIYKQRGLLTSAGREIKNKEEILSLLEALHLPKRLAIIHCPGGQKAKDPISRGNQMADRVAKQAAQGVNLLPMIETPKAP

SEQ ID NO: 81 - DNA, 2061 bp, synthetic construct
  misc_feature 1..2061: note = Engineered reverse transcriptase variants
  source 1..2061: mol_type = other DNA
atgcatcaccatcaccatcatggtggtagcggagtgctgacccttcagctggatgatgaatatcgcttgtacagtccgctggtcaaaccagaccaaaacattcagttctggctcgaacagtttccgcaagcgtgggctgaaactggtggcatgggcctggccaaacaggttcctcctcaggtaatccagttaaaggcatctgccacgccggtgtcagttcgtcagtatccgctgtcgaaagaagcgcaagaggggattcgcccacacgttcagcgtttgatccagcagggcattctggtaccggttcaaagcccctggaataccccgcttttaccagtccgtaaaccgggtacaaacgattaccgtcctgtgcaagacctgcgcgaagtcaataaacgtgtgcaggatatccacccaaccgttccgaacccgtataatctgttgtgcgcgttaccgccgcagcgttcctggtacacggtgctggacctgaaggacgcgttcttctgtcttcgcctccatcccaccagccagccactgtttgcctttgaatggcgcgatcctgatacgggccgtactgggcaattaacatggacccgtttgccgcagggctttaagaacagtcccgcgctgtttgatgaggctcttcaccgcgacctcgcaaatttccgcatccaacacccacaggtaacgttactccagtatgtcgatgatcttttgttagcgggtgccaccaaacaggactgcttggaaggaacgaaagcacttctcttggaactctcggatttaggttatcgtgtgtccgccaagaaagctcagatttgtcgccgcgaagtgacatacttaggctattcattgcgtgatggtcaacgttggcttactgaggcgcgcaagaagaccgttgttcaaatccccgcccctaagaccccgaaacagatgcgtgaatttcttggcacggcaggtttttgccgtttgtggattcctggctttgctaccttagcggcacccctctatccactcacgaaagagaaaggagaattctcttgggctccagaacatcagaaagcgtttgacgccatcaagaaagcgttattaagcgctcctgctcttgcattgcccgatgtcaccaaaccattcacgctctacgtggatgaacgcaaaggcgtagcccgcggtgtgttgacacagaccttaggaccttggcgtcgtcccgtggcctacctctcgaagaaacttgacccagttgcaagtggttggcctgtctgcttgaaagctattgccgcagttgcaatcctcgtcaaagatgccgacaaacttactttgggccagaacattactgttattgcaccacacgcccttgaaaacatcgttcgtcagccacctgatcgctggatgaccaatgctcgcatgacgcattatcagagcctcttgcttaccgaacgcgtgacttttgctccacctgcagccttaaaccccgcaacccttttacccgaagaaacagatgagcctgtgacgcatgactgtcaccagctcttgattgaagaaactggcgtacgcaaagacctcaccgatattccattaacaggtgaggtacttacgtggtttaccgaggggtcctcttatgtcgtcgaaggcaaacgtatggctggtgccgccgttgttgatggcacccgtactatctgggcaagcagcttacccgaaggcacgagtgctcagaaagcagagttgatggccttgacccaagccttacgccttgctgaagggaaatcgatcaatatttacaccgactcacgcagcgcattcgccacggcacatgtacacggtgccatctacaaacaacgtggtttgttaacttctgctggccgcgagattaagaacaaagaagaaatcctttccttacttgaagccttacacctccccaaacgtctcgctattattcattgtccagggcatcagaaagcaaaagatcctatcagccgtgggaatcaaatggcagatcgtgtcgctaaacaggcagcccaaggcgttaacttgttgcccatgattgagacccctaaagctcca

SEQ ID NO: 82 - protein, 687 aa, synthetic construct
  REGION 1..687: note = Engineered reverse transcriptase variants
MHHHHHHGGSGVLTLQLDDEYRLYSPLVKPDQNIQFWLEQFPQAWAETGGMGLAKQVPPQVIQLKASATPVSVRQYPLSKEAQEGIRPHVQRLIQQGILVPVQSPWNTPLLPVRKPGTNDYRPVQDLREVNKRVQDIHPTVPNPYNLLCALPPQRSWYTVLDLKDAFFCLRLHPTSQPLFAFEWRDPDTGRTGQLTWTRLPQGFKNSPALFDEALHRDLANFRIQHPQVTLLQYVDDLLLAGATKQDCLEGTKALLLELSDLGYRVSAKKAQICRREVTYLGYSLRDGQRWLTEARKKTVVQIPAPKTPKQMREFLGTAGFCRLWIPGFATLAAPLYPLTKEKGEFSWAPEHQKAFDAIKKALLSAPALALPDVTKPFTLYVDERKGVARGVLTQTLGPWRRPVAYLSKKLDPVASGWPVCLKAIAAVAILVKDADKLTLGQNITVIAPHALENIVRQPPDRWMTNARMTHYQSLLLTERVTFAPPAALNPATLLPEETDEPVTHDCHQLLIEETGVRKDLTDIPLTGEVLTWFTEGSSYVVEGKRMAGAAVVDGTRTIWASSLPEGTSAQKAELMALTQALRLAEGKSINIYTDSRSAFATAHVHGAIYKQRGLLTSAGREIKNKEEILSLLEALHLPKRLAIIHCPGHQKAKDPISRGNQMADRVAKQAAQGVNLLPMIETPKAP

SEQ ID NO: 83 - DNA, 2061 bp, synthetic construct
  misc_feature 1..2061: note = Engineered reverse transcriptase variants
  source 1..2061: mol_type = other DNA
atgcatcaccatcaccatcatggtggtagcggagtgctgacccttcagctggatgatgaatatcgcttgtacagtccgctggtcaaaccagaccaaaacattcagttctggctcgaacagtttccgcaagcgtgggctgaaactgctggcatgggcctggccaaacaggttcctcctcaggtaatccagttaaaggcatctgccacgccggtgtcagttcgtcagtatccgctgtcgaaagaagcgcaagaggggattcgcccacacgtgcagcgtttgatccagcagggcattctggtaccggttcaaagcccctggaataccccgcttttaccagtccgtaaaccgggtacaaacgattaccgtcctgtgcaagacctgcgcgaagtcaataaacgtgtgcaggatatccacccaaccgttccgaacccgtataatctgttgtgcgcgttaccgccgcagcgttcctggtacacggtgctggacctgaaggacgcgttcttctgtcttcgcctccatcccaccagccagccactgtttgcctttgaatggcgcgatcctgatacgggccgtactgggcaattaacatggacccgtttgccgcagggctttaagaacagtcccacgatctttgatgaggctcttcgtcgcgacctcgcaaatttccgcatccaacacccacaggtaacgttactccagtatgtcgatgatcttttgttagcgggtgccaccaaacaggactgcttggaaggaacgaaagcacttctcttggaactctcggatttaggttatcgtgtgtccgccaagaaagctcagatttgtcgccgcgaagtgacatacttaggctattcattgcgtgatggtcaacgttggcttactgaggcgcgcaagaagaccgttgttcaaatccccgcccctacgaccgcgaaacagatgcgtgaatttcttggcacggcaggtttttgccgtttgtggattcctggctttgctaccttagcggcacccctctatccactcacgaaagagaaaggagaattctcttgggccccagaacatcagaaagcgtttgacgccatcaagaaagcgttattaagcgctcctgctcttgcattgcccgatgtcaccaaaccattcacgctctacgtggatgaacgcaaaggcgtagcccgcggtgtgttgacacagaccttaggaccttggcgtcgtcccgtggcctacctctcgaagaaacttgacccagttgcaagtggttggcctgtctgcttgaaagctattgccgcagttgcaatcctcgtcaaagatgccgacaaacttactttgggccagaacattactgttattgcaccacacgcccttgaaaacatcgttcgtcagccacctgatcgctggatgaccaatgctcgcatgacgcattatcagagcctcttgcttaccgaacgcgtgacttttgctccacctgcagccttaaaccccgcaacccttttacccgaagaaacagatgagcctgtgacgcatgactgtcaccagctcttgattgaagaaactggcgtacgcaaagacctcaccgatattccattaacaggtgaggtacttacgtggtttaccgaggggtcctcttatgtcgtcgaaggcaaacgtatggctggtgccgccgttgttgatggcacccgtactatctgggcaagcagcttacccgaaggcacgagtgctcagaaagcacaattgatggccttgacccaagccttacgccttgctgaagggaaatcgatcaatatttacaccgactcacgctatgcattcgccacggcacatgtacacggtgccatctacaaacaacgtggtttgttaacttctgctggccgcgagattaagaacaaagaagaaatcctttccttacttgaagccttacacctccccaaacgtctcgctattattcattgtccagggcatcagaaagcaaaagatcctatcagccgtgggaatcaaatggcagatcgtgtcgctaaacaggcagcccaaggcgttaacttgttgcccatgattgagacccctaaagctcca

SEQ ID NO: 84 - protein, 687 aa, synthetic construct
  REGION 1..687: note = Engineered reverse transcriptase variants
MHHHHHHGGSGVLTLQLDDEYRLYSPLVKPDQNIQFWLEQFPQAWAETAGMGLAKQVPPQVIQLKASATPVSVRQYPLSKEAQEGIRPHVQRLIQQGILVPVQSPWNTPLLPVRKPGTNDYRPVQDLREVNKRVQDIHPTVPNPYNLLCALPPQRSWYTVLDLKDAFFCLRLHPTSQPLFAFEWRDPDTGRTGQLTWTRLPQGFKNSPTIFDEALRRDLANFRIQHPQVTLLQYVDDLLLAGATKQDCLEGTKALLLELSDLGYRVSAKKAQICRREVTYLGYSLRDGQRWLTEARKKTVVQIPAPTTAKQMREFLGTAGFCRLWIPGFATLAAPLYPLTKEKGEFSWAPEHQKAFDAIKKALLSAPALALPDVTKPFTLYVDERKGVARGVLTQTLGPWRRPVAYLSKKLDPVASGWPVCLKAIAAVAILVKDADKLTLGQNITVIAPHALENIVRQPPDRWMTNARMTHYQSLLLTERVTFAPPAALNPATLLPEETDEPVTHDCHQLLIEETGVRKDLTDIPLTGEVLTWFTEGSSYVVEGKRMAGAAVVDGTRTIWASSLPEGTSAQKAQLMALTQALRLAEGKSINIYTDSRYAFATAHVHGAIYKQRGLLTSAGREIKNKEEILSLLEALHLPKRLAIIHCPGHQKAKDPISRGNQMADRVAKQAAQGVNLLPMIETPKAP

SEQ ID NO: 85 - DNA, 2061 bp, synthetic construct
  misc_feature 1..2061: note = Engineered reverse transcriptase variants
  source 1..2061: mol_type = other DNA
atgcatcaccatcaccatcatggtggtagcggagtgctgacccttcagctggatgatgaatatcgcttgtacagtccgctggtcaaaccagaccaaaacattcagttctggctcgaacagtttccgcaagcgtgggctgaaactggtggcatgggcctggccaaacaggttcctcctcaggtaatccagttaaaggcatctgccacgccggtgtcagttcgtcagtatccgctgtcgaaagaagcgcaagaggggattcgcccacacgtgcagcgtttgatccagcagggcattctggtaccggttcaaagcccctggaataccccgcttttaccagtccgtaaaccgggtacaaacgattaccgtcctgtgcaagacctgcgcgaagtcaataaacgtgtgcaggatatccacccaaccgttccgaacccgtataatctgttgtgcgcgttaccgccgcagcgttcctggtacacggtgctggacctgaaggacgcgttcttctgtcttcgcctcgcacccaccagccagccactgtttgcctttgaatggcgcgatcctgatacgggccgtactgggcaattaacatggacccgtttgccgcagggctttaagaacagtcccacgctgtttgatgaggctcttcaccgcgacctcgcaaatttccgcatccaacacccacaggtaacgttactccagtatgtcgatgatcttttgttagcgggtgccaccaaacaggactgcttggaaggaacgaaagcacttctcttggaactctcggatttaggttatcgtgtgtccgccaagaaagctcagatttgtcgccgcgaagtgacatacttaggctattcattgcgtgatggtcaacgttggcttactgaggcgcgcaagaagaccgttgttcaaatccccgcccctacgaccccgaaacagatgcgtgaatttcttggcacggcaggtgcgtgccgtttgtggattcctggctttgctacgttagcggcacccctctatccactcacgaaagagaaaggagaattctcttgggccccagaacatcagaaagcgtttgacgccatcaagaaagcgttattaagcgctcctgctcttgcattgcccgatgtcaccaaaccattcacgctctacgtggatgaacgcaaaggcgtagcccgcggtgtgttgacacagaccttaggaccttggcgtcgtcccgtggcctacctctcgaagaaacttgacccagttgcaagtggttggcctgtctgcttgaaagctattgccgcagttgcaatcctcgtcaaagatgccgacaaacttactttgggccagaacattactgttattgcaccacacgcccttgaaaacatcgttcgtcagccacctgatcgctggatgaccaatgctcgcatgacgcattatcagagcctcttgcttaccgaacgcgtgacttttgctccacctgcagccttaaaccccgcaacccttttacccgaagaaacagatgagcctgtgacgcatgactgtcaccagctcttgattgaagaaactggcgtacgcaaagacctcaccgatattccattaacaggtgaggtacttacgtggtttaccgaggggtcctcttatgtcgtcgaaggcaaacgtatggctggtgccgccgttgttgatggcacccgtactatctgggcaagcagcttacccgaaggcacgagtgctcagaaagcagagttgatggccttgacccaagccttacgccttgctgaagggaaatcgatcaatatttacaccgactcacgcagcgcattcgccacggcacatgtacacggtgccatctacaaacaacgtggtttgttaacttctgctggccgcgagattaagaacaaagaagaaatcctttccttacttgaagccttacacctccccaaacgtctcgctattattcattgtccagggcatcagaaagcaaaagatcctatcagccgtgggaatcaaatggcagatcgtgtcgctaaacaggcagcccaaggcgttaacttgttgcccatgattgagacccctaaagctcca

SEQ ID NO: 86 - protein, 687 aa, synthetic construct
  REGION 1..687: note = Engineered reverse transcriptase variants
MHHHHHHGGSGVLTLQLDDEYRLYSPLVKPDQNIQFWLEQFPQAWAETGGMGLAKQVPPQVIQLKASATPVSVRQYPLSKEAQEGIRPHVQRLIQQGILVPVQSPWNTPLLPVRKPGTNDYRPVQDLREVNKRVQDIHPTVPNPYNLLCALPPQRSWYTVLDLKDAFFCLRLAPTSQPLFAFEWRDPDTGRTGQLTWTRLPQGFKNSPTLFDEALHRDLANFRIQHPQVTLLQYVDDLLLAGATKQDCLEGTKALLLELSDLGYRVSAKKAQICRREVTYLGYSLRDGQRWLTEARKKTVVQIPAPTTPKQMREFLGTAGACRLWIPGFATLAAPLYPLTKEKGEFSWAPEHQKAFDAIKKALLSAPALALPDVTKPFTLYVDERKGVARGVLTQTLGPWRRPVAYLSKKLDPVASGWPVCLKAIAAVAILVKDADKLTLGQNITVIAPHALENIVRQPPDRWMTNARMTHYQSLLLTERVTFAPPAALNPATLLPEETDEPVTHDCHQLLIEETGVRKDLTDIPLTGEVLTWFTEGSSYVVEGKRMAGAAVVDGTRTIWASSLPEGTSAQKAELMALTQALRLAEGKSINIYTDSRSAFATAHVHGAIYKQRGLLTSAGREIKNKEEILSLLEALHLPKRLAIIHCPGHQKAKDPISRGNQMADRVAKQAAQGVNLLPMIETPKAP

SEQ ID NO: 87 - DNA, 2061 bp, synthetic construct
  misc_feature 1..2061: note = Engineered reverse transcriptase variants
  source 1..2061: mol_type = other DNA
atgcatcaccatcaccatcatggtggtagcggagtgctgacccttcagctggatgatgaatatcgcttgtacagtccgctggtcaaaccagaccaaaacattcagttctggctcgaacagtttccgcaagcgtgggctgaaactgcaggcatgggcctggccaaacaggttcctcctcaggtaatccaattaaaggcatctgccacgccggtgtcagttcgtcagtatccgctgtcgaaagaagcgcaagaggggattcgcccacacgtgcagcgtttgatccagcagggcattctggtaccggttcaaagcccctggaataccccgcttttaccagtccgcaaaccgggtacaaacgattaccgtcctgtgcaagacctgcgcgaagtcaataaacgtgtgcaggatatccacccaaccgttccgaacccgtataatctgttgtgcgcgttaccgccgcagcgttcctggtacacggtgctggacctgaaggacgcgttcttctgtcttcgcctccaccccaccagccagccactgtttgcctttgaatggcgcgatcctgatacgggccgtactgggcaattaacatggacccgtttgccgcagggctttaagaacagtcccaccatttttgatgaggctcttcaccgcgacctcgcaaatttccgcatccaacacccacaggtaacgttactccagtatgtcgatgatcttttgttagcgggtgccaccaaacaggactgcttggaaggaacgaaagcacttctcttggaactctcggatttaggttatcgtgtgtccgccaagaaagctcagatttgtcgccgcgaagtgacatacttaggctattcattgcgtgatggtcaacgttggcttactgaggcgcgcaagaagaccgttgttcaaatccccgcccctaccaccgcgaaacagatgcgtgaatttcttggcacggcaggtttctgccgtttgtggattcctggctttgctgaattagcggcacccctctatccactcacgaaagagaaaggagaattctcttgggccccagaacatcagaaagcgtttgacgccatcaagaaagcgttattaagcgctcctgctcttgcattgcccgatgtcaccaaaccattcacgctctacgtggatgaacgcaaaggcgtagcccgcggtgtgttgacacagaccttaggaccttggcgtcgtcccgtggcctacctctcgaagaaacttgacccagttgcaagtggttggcctgtctgcttgaaagctattgccgcagttgcaatcctcgtcaaagatgccgacaaacttactttgggccagaacattactgttattgcaccacacgcccttgaaaacatcgttcgtcagccacctgatcgctggatgaccaatgctcgcatgacgcattatcagagcctcttgcttaccgaacgcgtgacttttgctccacctgcagccttaaaccccgcaacccttttacccgaagaaacagatgagcctgtgacgcatgactgtcaccagctcttgattgaagaaactggcgtacgcaaagacctcaccgatattccattaacaggtgaggtacttacgtggtttaccgaggggtcctcttatgtcgtcgaaggcaaacgtatggctggtgccgccgttgttgatggcacccgtactatctgggcaagcagcttacccgaaggcacgagtgctcagaaagcagagttgatggccttgacccaagccttacgccttgctgaagggaaatcgatcaatatttacaccgactcacgcagcgcattcgccacggcacatgtacacggtgccatctacaaacaacgtggtttgttaacttctgctggccgcgagattaagaacaaagaagaaatcctttccttacttgaagccttacacctccccaaacgtctcgctattattcattgtccagggcatcagaaagcaaaagatcctatcagccgtgggaatcaaatggcagatcgtgtcgctaaacaggcagcccaaggcgttaacttgttgcccatgattgagacccctaaagctcca

SEQ ID NO: 88 - protein, 687 aa, synthetic construct
  REGION 1..687: note = Engineered reverse transcriptase variants
MHHHHHHGGSGVLTLQLDDEYRLYSPLVKPDQNIQFWLEQFPQAWAETAGMGLAKQVPPQVIQLKASATPVSVRQYPLSKEAQEGIRPHVQRLIQQGILVPVQSPWNTPLLPVRKPGTNDYRPVQDLREVNKRVQDIHPTVPNPYNLLCALPPQRSWYTVLDLKDAFFCLRLHPTSQPLFAFEWRDPDTGRTGQLTWTRLPQGFKNSPTIFDEALHRDLANFRIQHPQVTLLQYVDDLLLAGATKQDCLEGTKALLLELSDLGYRVSAKKAQICRREVTYLGYSLRDGQRWLTEARKKTVVQIPAPTTAKQMREFLGTAGFCRLWIPGFAELAAPLYPLTKEKGEFSWAPEHQKAFDAIKKALLSAPALALPDVTKPFTLYVDERKGVARGVLTQTLGPWRRPVAYLSKKLDPVASGWPVCLKAIAAVAILVKDADKLTLGQNITVIAPHALENIVRQPPDRWMTNARMTHYQSLLLTERVTFAPPAALNPATLLPEETDEPVTHDCHQLLIEETGVRKDLTDIPLTGEVLTWFTEGSSYVVEGKRMAGAAVVDGTRTIWASSLPEGTSAQKAELMALTQALRLAEGKSINIYTDSRSAFATAHVHGAIYKQRGLLTSAGREIKNKEEILSLLEALHLPKRLAIIHCPGHQKAKDPISRGNQMADRVAKQAAQGVNLLPMIETPKAP

SEQ ID NO: 89 - DNA, 2061 bp, synthetic construct
  misc_feature 1..2061: note = Engineered reverse transcriptase variants
  source 1..2061: mol_type = other DNA
atgcatcaccatcaccatcatggtggtagcggagtgctgacccttcagctggatgatgaatatcgcttgtacagtccgctggtcaaaccagaccaaaacattcagttctggctcgaacagtttccgcaagcgtgggctgaaactgctggcatgggcctggccaaacaggttcctcctcaggtaatccaattaaaggcatctgccacgccggtgtcagttcgtcagtatccgctgtcgaaagaagcgcaagaggggattcgcccacacgttcagcgtttgatccagcagggcattctggtaccggttcaaagcccctggaataccccgcttttaccagtccgcaaaccgggtacaaacgattaccgtcctgtgcaagacctgcgcgaagtcaataaacgtgtgcaggatatccacccaaccgttccgaacccgtataatctgttgtgcgcgttaccgccgcagcgttcctggtacacggtgctggacctgaaggacgcgttcttctgtcttcgcctccaccccaccagccagccactgtttgcctttgaatggcgcgatcctgatacgggccgtactgggcaattaacatggacccgtttgccgcagggctttaagaacagtcccaccatttttgatgaggctcttcaccgcgacctcgcaaatttccgcatccaacacccacaggtaacgttactccagtatgtcgatgatcttttgttagcgggtgccaccaaacaggactgcttggaaggaacgaaagcacttctcttggaactctcggatttaggttatcgtgtgtccgccaagaaagctcagatttgtcgccgcgaagtgacatacttaggctattcattgcgtgatggtcaacgttggcttactgaggcgcgcaagaagaccgttgttcaaatccccgcccctacgaccgcgaaacagatgcgtgaatttcttggcacggcaggtgcgtgccgtttgtggattcctggctttgctaccttagcggcacccctctatccactcacgaaagagaaaggagaattctcttgggccccagaacatcagaaagcgtttgacgccatcaagaaagcgttattaagcgctcctgctcttgcattgcccgatgtcaccaaaccattcacgctctacgtggatgaacgcaaaggcgtagcccgcggtgtgttgacacagaccttaggaccttggcgtcgtcccgtggcctacctctcgaagaaacttgacccagttgcaagtggttggcctgtctgcttgaaagctattgccgcagttgcaatcctcgtcaaagatgccgacaaacttactttgggccagaacattactgttattgcaccacacgcccttgaaaacatcgttcgtcagccacctgatcgctggatgaccaatgctcgcatgacgcattatcagagcctcttgcttaccgaacgcgtgacttttgctccacctgcagccttaaaccccgcaacccttttacccgaagaaacagatgagcctgtgacgcatgactgtcaccagctcttgattgaagaaactggcgtacgcaaagacctcaccgatattccattaacaggtgaggtacttacgtggtttaccgacgggtcctcttatgtcgtcgaaggcaaacgtatggctggtgccgccgttgttgatggcacccgtactatctgggcaagcagcttacccgaaggcacgagtgctcagaaagcagatttgatggccttgacccaagccttacgccttgctgaagggaaatcgatcaatatttacaccgactcacgctatgcattcgccacggcacatgtacacggtgccatctacaaacaacgtggtttgttaacttctgctggccgcgagattaagaacaaagaagaaatcctttccttacttgaagccttacacctccccaaacgtctcgctattattcattgtccagggcatcagaaagcaaaagatcctatcagccgtgggaatcaaatggcagatcgtgtcgctaaacaggcagcccaaggcgttaacttgttgcccatgattgagacccctaaagctcca

SEQ ID NO: 90 - protein, 687 aa, synthetic construct
  REGION 1..687: note = Engineered reverse transcriptase variants
MHHHHHHGGSGVLTLQLDDEYRLYSPLVKPDQNIQFWLEQFPQAWAETAGMGLAKQVPPQVIQLKASATPVSVRQYPLSKEAQEGIRPHVQRLIQQGILVPVQSPWNTPLLPVRKPGTNDYRPVQDLREVNKRVQDIHPTVPNPYNLLCALPPQRSWYTVLDLKDAFFCLRLHPTSQPLFAFEWRDPDTGRTGQLTWTRLPQGFKNSPTIFDEALHRDLANFRIQHPQVTLLQYVDDLLLAGATKQDCLEGTKALLLELSDLGYRVSAKKAQICRREVTYLGYSLRDGQRWLTEARKKTVVQIPAPTTAKQMREFLGTAGACRLWIPGFATLAAPLYPLTKEKGEFSWAPEHQKAFDAIKKALLSAPALALPDVTKPFTLYVDERKGVARGVLTQTLGPWRRPVAYLSKKLDPVASGWPVCLKAIAAVAILVKDADKLTLGQNITVIAPHALENIVRQPPDRWMTNARMTHYQSLLLTERVTFAPPAALNPATLLPEETDEPVTHDCHQLLIEETGVRKDLTDIPLTGEVLTWFTDGSSYVVEGKRMAGAAVVDGTRTIWASSLPEGTSAQKADLMALTQALRLAEGKSINIYTDSRYAFATAHVHGAIYKQRGLLTSAGREIKNKEEILSLLEALHLPKRLAIIHCPGHQKAKDPISRGNQMADRVAKQAAQGVNLLPMIETPKAP

SEQ ID NO: 91 - DNA, 2061 bp, synthetic construct
  misc_feature 1..2061: note = Engineered reverse transcriptase variants
  source 1..2061: mol_type = other DNA
atgcatcaccatcaccatcatggtggtagcggagtgctgacccttcagctggatgatgaatatcgcttgtacagtccgctggtcaaaccagaccaaaacattcagttctggctcgaacagtttccgcaagcgtgggctgaaactgctggcatgggcctggccaaacaggttcctcctcaggtaatccagttaaaggcatctgccacgccggtgtcagttcgtcagtatccgctgtcgaaagaagcgcaagaggggattcgcccacacgttcagcgtttgatccagcagggcattctggtaccggttcaaagcccctggaataccccgcttttaccagtccgtaaaccgggtacaaacgattaccgtcctgtgcaagacctgcgcgaagtcaataaacgtgtgcaggatatccacccaaccgttccgaacccgtataatctgttgtgcgcgttaccgccgcagcgttcctggtacacggtgctggacctgaaggacgcgttcttctgtcttcgcctcgcacccaccagccagccactgtttgcctttgaatggcgcgatcctgatacgggccgtactgggcaattaacatggacccgtttgccgcagggctttaagaacagtcccaccatttttgatgaggctcttcatcgcgacctcgcaaatttccgcatccaacacccacaggtaacgttactccagtatgtcgatgatcttttgttagcgggtgccaccaaacaggactgcttggaaggaacgaaagcacttctcttggaactctcggatttaggttatcgtgtgtccgccaagaaagctcagatttgtcgccgcgaagtgacatacttaggctattcattgcgtgatggtcaacgttggcttactgaggcgcgcaagaagaccgttgttcaaatccccgcccctacgaccgcgaaacagatgcgtgaatttcttggcacggcaggtgcgtgccgtttgtggattcctggctttgctgaattagcggcacccctctatccactcacgaaagagaaaggagaattctcttggggtccagaacatcagaaagcgtttgacgccatcaagaaagcgttattaagcgctcctgctcttgcattgcccgatgtcaccaaaccattcacgctctacgtggatgaacgcaaaggcgtagcccgcggtgtgttgacacagaccttaggaccttggcgtcgtcccgtggcctacctctcgaagaaacttgacccagttgcaagtggttggcctgtctgcttgaaagctattgccgcagttgcaatcctcgtcaaagatgccgacaaacttactttgggccagaacattactgttattgcaccacacgcccttgaaaacatcgttcgtcagccacctgatcgctggatgaccaatgctcgcatgacgcattatcagagcctcttgcttaccgaacgcgtgacttttgctccacctgcagccttaaaccccgcaacccttttacccgaagaaacagatgagcctgtgacgcatgactgtcaccagctcttgattgaagaaactggcgtacgcaaagacctcaccgatattccattaacaggtgaggtacttacgtggtttaccgacgggtcctcttatgtcgtcgaaggcaaacgtatggctggtgccgccgttgttgatggcacccgtactatctgggcaagcagcttacccgaaggcacgagtgctcagaaagcagatttgatggccttgacccaagccttacgccttgctgaagggaaatcgatcaatatttacaccgactcacgctatgcattcgccacggcacatgtacacggtgccatctacaaacaacgtggtttgttaacttctgctggccgcgagattaagaacaaagaagaaatcctttccttacttgaagccttacacctccccaaacgtctcgctattattcattgtccagggcatcagaaagcaaaagatcctatcagccgtgggaatcaaatggcagatcgtgtcgctaaacaggcagcccaaggcgttaacttgttgcccatgattgagacccctaaagctcca

SEQ ID NO: 92 - protein, 687 aa, synthetic construct
  REGION 1..687: note = Engineered reverse transcriptase variants
MHHHHHHGGSGVLTLQLDDEYRLYSPLVKPDQNIQFWLEQFPQAWAETAGMGLAKQVPPQVIQLKASATPVSVRQYPLSKEAQEGIRPHVQRLIQQGILVPVQSPWNTPLLPVRKPGTNDYRPVQDLREVNKRVQDIHPTVPNPYNLLCALPPQRSWYTVLDLKDAFFCLRLAPTSQPLFAFEWRDPDTGRTGQLTWTRLPQGFKNSPTIFDEALHRDLANFRIQHPQVTLLQYVDDLLLAGATKQDCLEGTKALLLELSDLGYRVSAKKAQICRREVTYLGYSLRDGQRWLTEARKKTVVQIPAPTTAKQMREFLGTAGACRLWIPGFAELAAPLYPLTKEKGEFSWGPEHQKAFDAIKKALLSAPALALPDVTKPFTLYVDERKGVARGVLTQTLGPWRRPVAYLSKKLDPVASGWPVCLKAIAAVAILVKDADKLTLGQNITVIAPHALENIVRQPPDRWMTNARMTHYQSLLLTERVTFAPPAALNPATLLPEETDEPVTHDCHQLLIEETGVRKDLTDIPLTGEVLTWFTDGSSYVVEGKRMAGAAVVDGTRTIWASSLPEGTSAQKADLMALTQALRLAEGKSINIYTDSRYAFATAHVHGAIYKQRGLLTSAGREIKNKEEILSLLEALHLPKRLAIIHCPGHQKAKDPISRGNQMADRVAKQAAQGVNLLPMIETPKAP

SEQ ID NO: 93 - DNA, 2061 bp, synthetic construct
  misc_feature 1..2061: note = Engineered reverse transcriptase variants
  source 1..2061: mol_type = other DNA
atgcatcaccatcaccatcatggtggtagcggagtgctgacccttcagctggatgatgaatatcgcttgtacagtccgctggtcaaaccagaccaaaacattcagttctggctcgaacagtttccgcaagcgtgggctgaaactggtggcatgggcctggccaaacaggttcctcctcaggtaatccaattaaaggcatctgccacgccggtgtcagttcgtcagtatccgctgtcgaaagaagcgcaagaggggattcgcccacacgtgcagcgtttgatccagcagggcattctggtaccggttcaaagcccctggaataccccgcttttaccagtccgcaaaccgggtacaaacgattaccgtcctgtgcaagacctgcgcgaagtcaataaacgtgtgcaggatatccacccaaccgttccgaacccgtataatctgttgtgcgcgttaccgccgcagcgttcctggtacacggtgctggacctgaaggacgcgttcttctgtcttcgcctccatcccaccagccagccactgtttgcctttgaatggcgcgatcctgatacgggccgtactgggcaattaacatggacccgtttgccgcagggctttaagaacagtcccacgatctttgatgaggctcttcaccgcgacctcgcaaatttccgcatccaacacccacaggtaacgttactccagtatgtcgatgatcttttgttagcgggtgccaccaaacaggactgcttggaaggaacgaaagcacttctcttggaactctcggatttaggttatcgtgtgtccgccaagaaagctcagatttgtcgccgcgaagtgacatacttaggctattcattgcgtgatggtcaacgttggcttactgaggcgcgcaagaagaccgttgttcaaatccccgcccctaagaccgcgaaacagatgcgtgaatttcttggcacggcaggtttctgccgtttgtggattcctggctttgctacgttagcggcacccctctatccactcacgaaagagaaaggagaattctcttgggccccagaacatcagaaagcgtttgacgccatcaagaaagcgttattaagcgctcctgctcttgcattgcccgatgtcaccaaaccattcacgctctacgtggatgaacgcaaaggcgtagcccgcggtgtgttgacacagaccttaggaccttggcgtcgtcccgtggcctacctctcgaagaaacttgacccagttgcaagtggttggcctgtctgcttgaaagctattgccgcagttgcaatcctcgtcaaagatgccgacaaacttactttgggccagaacattactgttattgcaccacacgcccttgaaaacatcgttcgtcagccacctgatcgctggatgaccaatgctcgcatgacgcattatcagagcctcttgcttaccgaacgcgtgacttttgctccacctgcagccttaaaccccgcaacccttttacccgaagaaacagatgagcctgtgacgcatgactgtcaccagctcttgattgaagaaactggcgtacgcaaagacctcaccgatattccattaacaggtgaggtacttacgtggtttaccgaggggtcctcttatgtcgtcgaaggcaaacgtatggctggtgccgccgttgttgatggcacccgtactatctgggcaagcagcttacccgaaggcacgagtgctcagaaagcagagttgatggccttgacccaagccttacgccttgctgaagggaaatcgatcaatatttacaccgactcacgctatgcattcgccacggcacatgtacacggtgccatctacaaacaacgtggtttgttaacttctgctggccgcgagattaagaacaaagaagaaatcctttccttacttgaagccttacacctccccaaacgtctcgctattattcattgtccagggcatcagaaagcaaaagatcctatcagccgtgggaatcaaatggcagatcgtgtcgctaaacaggcagcccaaggcgttaacttgttgcccatgattgagacccctaaagctcca

SEQ ID NO: 94 - protein, 687 aa, synthetic construct
  REGION 1..687: note = Engineered reverse transcriptase variants
MHHHHHHGGSGVLTLQLDDEYRLYSPLVKPDQNIQFWLEQFPQAWAETGGMGLAKQVPPQVIQLKASATPVSVRQYPLSKEAQEGIRPHVQRLIQQGILVPVQSPWNTPLLPVRKPGTNDYRPVQDLREVNKRVQDIHPTVPNPYNLLCALPPQRSWYTVLDLKDAFFCLRLHPTSQPLFAFEWRDPDTGRTGQLTWTRLPQGFKNSPTIFDEALHRDLANFRIQHPQVTLLQYVDDLLLAGATKQDCLEGTKALLLELSDLGYRVSAKKAQICRREVTYLGYSLRDGQRWLTEARKKTVVQIPAPKTAKQMREFLGTAGFCRLWIPGFATLAAPLYPLTKEKGEFSWAPEHQKAFDAIKKALLSAPALALPDVTKPFTLYVDERKGVARGVLTQTLGPWRRPVAYLSKKLDPVASGWPVCLKAIAAVAILVKDADKLTLGQNITVIAPHALENIVRQPPDRWMTNARMTHYQSLLLTERVTFAPPAALNPATLLPEETDEPVTHDCHQLLIEETGVRKDLTDIPLTGEVLTWFTEGSSYVVEGKRMAGAAVVDGTRTIWASSLPEGTSAQKAELMALTQALRLAEGKSINIYTDSRYAFATAHVHGAIYKQRGLLTSAGREIKNKEEILSLLEALHLPKRLAIIHCPGHQKAKDPISRGNQMADRVAKQAAQGVNLLPMIETPKAP

SEQ ID NO: 95 - DNA, 2061 bp, synthetic construct
  misc_feature 1..2061: note = Engineered reverse transcriptase variants
  source 1..2061: mol_type = other DNA
atgcatcaccatcaccatcatggtggtagcggagtgctgacccttcagctggatgatgaatatcgcttgtacagtccgctggtcaaaccagaccaaaacattcagttctggctcgaacagtttccgcaagcgtgggctgaaactgctggcatgggcctggccaaacaggttcctcctcaggtaatccaattaaaggcatctgccacgccggtgtcagttcgtcagtatccgctgtcgaaagaagcgcaagaggggattcgcccacacgtgcagcgtttgatccagcagggcattctggtaccggttcaaagcccctggaataccccgcttttaccagtccgcaaaccgggtacaaacgattaccgtcctgtgcaagacctgcgcgaagtcaataaacgtgtgcaggatatccacccaaccgttccgaacccgtataatctgttgtgcgcgttaccgccgcagcgttcctggtacacggtgctggacctgaaggacgcgttcttctgtcttcgcctccaccccaccagccagccactgtttgcctttgaatggcgcgatcctgatacgggccgtactgggcaattaacatggacccgtttgccgcagggctttaagaacagtcccaccatttttgatgaggctcttcgtcgcgacctcgcaaatttccgcatccaacacccacaggtaacgttactccagtatgtcgatgatcttttgttagcgggtgccaccaaacaggactgcttggaaggaacgaaagcacttctcttggaactctcggatttaggttatcgtgtgtccgccaagaaagctcagatttgtcgccgcgaagtgacatacttaggctattcattgcgtgatggtcaacgttggcttactgaggcgcgcaagaagaccgttgttcaaatccccgcccctacgaccccgaaacagatgcgtgaatttcttggcacggcaggtttctgccgtttgtggattcctggctttgctacgttagcggcacccctctatccactcacgaaagagaaaggagaattctcttgggccccagaacatcagaaagcgtttgacgccatcaagaaagcgttattaagcgctcctgctcttgcattgcccgatgtcaccaaaccattcacgctctacgtggatgaacgcaaaggcgtagcccgcggtgtgttgacacagaccttaggaccttggcgtcgtcccgtggcctacctctcgaagaaacttgacccagttgcaagtggttggcctgtctgcttgaaagctattgccgcagttgcaatcctcgtcaaagatgccgacaaacttactttgggccagaacattactgttattgcaccacacgcccttgaaaacatcgttcgtcagccacctgatcgctggatgaccaatgctcgcatgacgcattatcagagcctcttgcttaccgaacgcgtgacttttgctccacctgcagccttaaaccccgcaacccttttacccgaagaaacagatgagcctgtgacgcatgactgtcaccagctcttgattgaagaaactggcgtacgcaaagacctcaccgatattccattaacaggtgaggtacttacgtggtttaccgacgggtcctcttatgtcgtcgaaggcaaacgtatggctggtgccgccgttgttgatggcacccgtactatctgggcaagcagcttacccgaaggcacgagtgctcagaaagcagatttgatggccttgacccaagccttacgccttgctgaagggaaatcgatcaatatttacaccgactcacgctatgcattcgccacggcacatgtacacggtgccatctacaaacaacgtggtttgttaacttctgctggccgcgagattaagaacaaagaagaaatcctttccttacttgaagccttacacctccccaaacgtctcgctattattcattgtccagggggtcagaaagcaaaagatcctatcagccgtgggaatcaaatggcagatcgtgtcgctaaacaggcagcccaaggcgttaacttgttgcccatgattgagacccctaaagctcca

SEQ ID NO: 96 - protein, 687 aa, synthetic construct
  REGION 1..687: note = Engineered reverse transcriptase variants
MHHHHHHGGSGVLTLQLDDEYRLYSPLVKPDQNIQFWLEQFPQAWAETAGMGLAKQVPPQVIQLKASATPVSVRQYPLSKEAQEGIRPHVQRLIQQGILVPVQSPWNTPLLPVRKPGTNDYRPVQDLREVNKRVQDIHPTVPNPYNLLCALPPQRSWYTVLDLKDAFFCLRLHPTSQPLFAFEWRDPDTGRTGQLTWTRLPQGFKNSPTIFDEALRRDLANFRIQHPQVTLLQYVDDLLLAGATKQDCLEGTKALLLELSDLGYRVSAKKAQICRREVTYLGYSLRDGQRWLTEARKKTVVQIPAPTTPKQMREFLGTAGFCRLWIPGFATLAAPLYPLTKEKGEFSWAPEHQKAFDAIKKALLSAPALALPDVTKPFTLYVDERKGVARGVLTQTLGPWRRPVAYLSKKLDPVASGWPVCLKAIAAVAILVKDADKLTLGQNITVIAPHALENIVRQPPDRWMTNARMTHYQSLLLTERVTFAPPAALNPATLLPEETDEPVTHDCHQLLIEETGVRKDLTDIPLTGEVLTWFTDGSSYVVEGKRMAGAAVVDGTRTIWASSLPEGTSAQKADLMALTQALRLAEGKSINIYTDSRYAFATAHVHGAIYKQRGLLTSAGREIKNKEEILSLLEALHLPKRLAIIHCPGGQKAKDPISRGNQMADRVAKQAAQGVNLLPMIETPKAP

SEQ ID NO: 97 - DNA, 2061 bp, synthetic construct
  misc_feature 1..2061: note = Engineered reverse transcriptase variants
  source 1..2061: mol_type = other DNA
atgcatcaccatcaccatcatggtggtagcggagtgctgacccttcagctggatgatgaatatcgcttgtacagtccgctggtcaaaccagaccaaaacattcagttctggctcgaacagtttccgcaagcgtgggctgaaactgcaggcatgggcctggccaaacaggttcctcctcaggtaatccaattaaaggcatctgccacgccggtgtcagttcgtcagtatccgctgtcgaaagaagcgcaagaggggattcgcccacacgtgcagcgtttgctgcagcagggcattctggtaccggtccaaagcccctggaataccccgcttttaccagtccgcaaaccgggtacaaacgattaccgtcctgtgcaagacctgcgcgaagtcaataaacgtgtgcaggatatccacccaaccgttccgaacccgtataatctgttgtgcgcgttaccgccgcagcgttcctggtacacggtgctggacctgaaggacgcgttcttctgtcttcgcctccaccccaccagccagccactgtttgcctttgaatggcgcgatcctgatacgggccgtactgggcaattaacatggacccgtttgccgcagggctttaagaacagtcccaccatttttgatgaggctcttcaccgcgacctcgcaaatttccgcatccaacacccacaggtaacgttactccagtatgtcgatgatcttttgttagcgggtgccaccaaacaggactgcttggaaggaacgaaagcacttctcttggaactcagcgatttaggttatcgtgtgtccgccaagaaagctcagatttgtcgccgcgaagtgacatacttaggctattcattgcgtgatggtcaacgttggcttactgaggcgcgcaagaagaccgttgttcaaatccccgcccctaccaccgcgaaacagatgcgtgaatttcttggcacggcaggtttctgccgtttgtggattcctggctttgctaccttagcggcacccctctatccactcacgaaagagaaaggagaattctcttgggccccagaacatcagaaagcgtttgacgccatcaagaaagcgttattaagcgctcctgctcttgggttgcccgatgtcaccaaaccattcacgctctacgtggatgaacgcaaaggcgtagcccgcggtgtgttgacacagaccttaggaccttggcgtcgtcccgtggcctacctctcgaagaaacttgacccagttgcaagtggttggcctgtctgcttgaaagctattgccgcagttgcaatcctcgtcaaagatgccgacaaacttactttgggccagaacattactgttattgcaccacacgcccttgaaaacatcgttcgtcagccacctgatcgctggatgaccaatgctcgcatgacgcattatcaggcgctcttgcttaccgaacgcgtgacttttgctccacctgcagccttaaaccccgcaacccttttacccgaagaaacagatgagcctgtgacgcatgactgtcaccagctcttgattgaagaaactggcgtacgcaaagacctcaccgatattccattaacaggtgaggtacttacgtggtttaccgatgggtcctcttatgtcgtcgaaggcaaacgtatggctggtgccgccgttgttgatggcacccgtactatctgggcaagcagcttacccgaaggcacgagtgctcagaaagcagagttgattgccttgacccaagccttacgccttgctgaagggaaatcgatcaatatttacaccgactcacgctatgcattcgccacggcacatgtacacggtgccatctacaaacaacgtggtttgttaacttctgctggccgcgagattaagaacaaagaagaaatcctttccttacttgaagccttacacctccccaaacgtctcgctattattcattgtccagggcatcagaaagcaaaagatcctatcagccgtgggaatcaaatggcagatcgtgtcgctaaacaggcagcccaaggcgttaacttgttgcccatgattgagacccctaaagctcca

SEQ ID NO: 98 - protein, 687 aa, synthetic construct
  REGION 1..687: note = Engineered reverse transcriptase variants
MHHHHHHGGSGVLTLQLDDEYRLYSPLVKPDQNIQFWLEQFPQAWAETAGMGLAKQVPPQVIQLKASATPVSVRQYPLSKEAQEGIRPHVQRLLQQGILVPVQSPWNTPLLPVRKPGTNDYRPVQDLREVNKRVQDIHPTVPNPYNLLCALPPQRSWYTVLDLKDAFFCLRLHPTSQPLFAFEWRDPDTGRTGQLTWTRLPQGFKNSPTIFDEALHRDLANFRIQHPQVTLLQYVDDLLLAGATKQDCLEGTKALLLELSDLGYRVSAKKAQICRREVTYLGYSLRDGQRWLTEARKKTVVQIPAPTTAKQMREFLGTAGFCRLWIPGFATLAAPLYPLTKEKGEFSWAPEHQKAFDAIKKALLSAPALGLPDVTKPFTLYVDERKGVARGVLTQTLGPWRRPVAYLSKKLDPVASGWPVCLKAIAAVAILVKDADKLTLGQNITVIAPHALENIVRQPPDRWMTNARMTHYQALLLTERVTFAPPAALNPATLLPEETDEPVTHDCHQLLIEETGVRKDLTDIPLTGEVLTWFTDGSSYVVEGKRMAGAAVVDGTRTIWASSLPEGTSAQKAELIALTQALRLAEGKSINIYTDSRYAFATAHVHGAIYKQRGLLTSAGREIKNKEEILSLLEALHLPKRLAIIHCPGHQKAKDPISRGNQMADRVAKQAAQGVNLLPMIETPKAP

SEQ ID NO: 99 - DNA, 2061 bp, synthetic construct
  misc_feature 1..2061: note = Engineered reverse transcriptase variants
  source 1..2061: mol_type = other DNA
atgcatcaccatcaccatcatggtggtagcggagtgctgacccttcagctggatgatgaatatcgcttgtacagtccgctggtcaaaccagaccaaaacattcagttctggctcgaacagtttccgcaagcgtgggctgaaactgctggcatgggcctggccaaacaggttcctcctcaggtaatccaattaaaggcatctgccacgccggtgtcagttcgtcagtatccgctgtcgaaagaagcgcaagaggggattcgcccacacattcagcgtttgatccagcagggcattctggtaccggttcaaagcccctggaataccccgcttttaccagtccgcaaaccgggtacaaacgattaccgtcctgtgcaagacctgcgcgaagtcaataaacgtgtgcaggatatccacccaaccgttccgaacccgtataatctgttgtgcgcgttaccgccgcagcgttcctggtacacggtgctggacctgaaggacgcgttcttctgtcttcgcctccatcccaccagccagccactgtttgcctttgaatggcgcgatcctgatacgggccgtactgggcaattaacatggacccgtttgccgcagggctttaagaacagtcccgcgctgtttgatgaggctcttcaccgcgacctcgcaaatttccgcatccaacacccacaggtaacgttactccagtatgtcgatgatcttttgttagcgggtgccaccaaacaggactgcttggaaggaacgaaagcacttctcttggaactctcggatttaggttatcgtgtgtccgccaagaaagctcagatttgtcgccgcgaagtgacatacttaggctattcattgcgtgatggtcaacgttggcttactgaggcgcgcaagaagaccgttgttcaaatccccgcccctacgaccccgaaacagatgcgtgaatttcttggcacggcaggtgcgtgccgtttgtggattcctggctttgctacgttagcggcacccctctatccactcacgaaagagaaaggagaattctcttgggctccagaacatcagaaagcgtttgacgccatcaagaaagcgttattaagcgctcctgctcttgcattgcccgatgtcaccaaaccattcacgctctacgtggatgaacgcaaaggcgtagcccgcggtgtgttgacacagaccttaggaccttggcgtcgtcccgtggcctacctctcgaagaaacttgacccagttgcaagtggttggcctgtctgcttgaaagctattgccgcagttgcaatcctcgtcaaagatgccgacaaacttactttgggccagaacattactgttattgcaccacacgcccttgaaaacatcgttcgtcagccacctgatcgctggatgaccaatgctcgcatgacgcattatcagagcctcttgcttaccgaacgcgtgacttttgctccacctgcagccttaaaccccgcaacccttttacccgaagaaacagatgagcctgtgacgcatgactgtcaccagctcttgattgaagaaactggcgtacgcaaagacctcaccgatattccattaacaggtgaggtacttacgtggtttaccgacgggtcctcttatgtcgtcgaaggcaaacgtatggctggtgccgccgttgttgatggcacccgtactatctgggcaagcagcttacccgaaggcacgagtgctcagaaagcagatttgatggccttgacccaagccttacgccttgctgaagggaaatcgatcaatatttacaccgactcacgctatgcattcgccacggcacatgtacacggtgccatctacaaacaacgtggtttgttaacttctgctggccgcgagattaagaacaaagaagaaatcctttccttacttgaagccttacacctccccaaacgtctcgctattattcattgtccagggcatcagaaagcaaaagatcctatcagccgtgggaatcaaatggcagatcgtgtcgctaaacaggcagcccaaggcgttaacttgttgcccatgattgagacccctaaagctcca

SEQ ID NO: 100 - protein, 687 aa, synthetic construct
  REGION 1..687: note = Engineered reverse transcriptase variants
MHHHHHHGGSGVLTLQLDDEYRLYSPLVKPDQNIQFWLEQFPQAWAETAGMGLAKQVPPQVIQLKASATPVSVRQYPLSKEAQEGIRPHIQRLIQQGILVPVQSPWNTPLLPVRKPGTNDYRPVQDLREVNKRVQDIHPTVPNPYNLLCALPPQRSWYTVLDLKDAFFCLRLHPTSQPLFAFEWRDPDTGRTGQLTWTRLPQGFKNSPALFDEALHRDLANFRIQHPQVTLLQYVDDLLLAGATKQDCLEGTKALLLELSDLGYRVSAKKAQICRREVTYLGYSLRDGQRWLTEARKKTVVQIPAPTTPKQMREFLGTAGACRLWIPGFATLAAPLYPLTKEKGEFSWAPEHQKAFDAIKKALLSAPALALPDVTKPFTLYVDERKGVARGVLTQTLGPWRRPVAYLSKKLDPVASGWPVCLKAIAAVAILVKDADKLTLGQNITVIAPHALENIVRQPPDRWMTNARMTHYQSLLLTERVTFAPPAALNPATLLPEETDEPVTHDCHQLLIEETGVRKDLTDIPLTGEVLTWFTDGSSYVVEGKRMAGAAVVDGTRTIWASSLPEGTSAQKADLMALTQALRLAEGKSINIYTDSRYAFATAHVHGAIYKQRGLLTSAGREIKNKEEILSLLEALHLPKRLAIIHCPGHQKAKDPISRGNQMADRVAKQAAQGVNLLPMIETPKAP

SEQ ID NO: 101 - DNA, 2061 bp, synthetic construct
  misc_feature 1..2061: note = Engineered reverse transcriptase variants
  source 1..2061: mol_type = other DNA
atgcatcaccatcaccatcatggtggtagcggagtgctgacccttcagctggatgatgaatatcgcttgtacagtccgctggtcaaaccagaccaaaacattcagttctggctcgaacagtttccgcaagcgtgggctgaaactggtggcatgggcctggccaaacaggttcctcctcaggtaatcctgttaaaggcatctgccacgccggtgtcagttcgtcagtatccgctgtcgaaagaagcgcaagaggggattcgcccacacattcagcgtttgatccagcagggcattctggtaccggttcaaagcccctggaataccccgcttttaccagtccgtaaaccgggtacaaacgattaccgtcctgtgcaagacctgcgcgaagtcaataaacgtgtgcaggatatccacccaaccgttccgaacccgtataatctgttgtgcgcgttaccgccgcagcgttcctggtacacggtgctggacctgaaggacgcgttcttctgtcttcgcctcgcacccaccagccagccactgtttgcctttgaatggcgcgatcctgatacgggccgtactgggcaattaacatggacccgtttgccgcagggctttaagaacagtcccaccatttttgatgaggctcttcatcgcgacctcgcaaatttccgcatccaacacccacaggtaacgttactccagtatgtcgatgatcttttgttagcgggtgccaccaaacaggactgcttggaaggaacgaaagcacttctcttggaactctcggatttaggttatcgtgtgtccgccaagaaagctcagatttgtcgccgcgaagtgacatacttaggctattcattgcgtgatggtcaacgttggcttactgaggcgcgcaagaagaccgttgttcaaatccccgcccctacgaccgcgaaacagatgcgtgaatttcttggcacggcaggtttttgccgtttgtggattcctggctttgctaccttagcggcacccctctatccactcacgaaagagaaaggagaattctcttgggctccagaacatcagaaagcgtttgacgccatcaagaaagcgttattaagcgctcctgctcttgcattgcccgatgtcaccaaaccattcacgctctacgtggatgaacgcaaaggcgtagcccgcggtgtgttgacacagaccttaggaccttggcgtcgtcccgtggcctacctctcgaagaaacttgacccagttgcaagtggttggcctgtctgcttgaaagctattgccgcagttgcaatcctcgtcaaagatgccgacaaacttactttgggccagaacattactgttattgcaccacacgcccttgaaaacatcgttcgtcagccacctgatcgctggatgaccaatgctcgcatgacgcattatcagagcctcttgcttaccgaacgcgtgacttttgctccacctgcagccttaaaccccgcaacccttttacccgaagaaacagatgagcctgtgacgcatgactgtcaccagctcttgattgaagaaactggcgtacgcaaagacctcaccgatattccattaacaggtgaggtacttacgtggtttaccgacgggtcctcttatgtcgtcgaaggcaaacgtatggctggtgccgccgttgttgatggcacccgtactatctgggcaagcagcttacccgaaggcacgagtgctcagaaagcagagttgatggccttgacccaagccttacgccttgctgaagggaaatcgatcaatatttacaccgactcacgctatgcattcgccacggcacatgtacacggtgccatctacaaacaacgtggtttgttaacttctgctggccgcgagattaagaacaaagaagaaatcctttccttacttgaagccttacacctccccaaacgtctcgctattattcattgtccagggcatcagaaagcaaaagatcctatcagccgtgggaatcaaatggcagatcgtgtcgctaaacaggcagcccaaggcgttaacttgttgcccatgattgagacccctaaagctcca

SEQ ID NO: 102 - protein, 687 aa, synthetic construct
  REGION 1..687: note = Engineered reverse transcriptase variants
MHHHHHHGGSGVLTLQLDDEYRLYSPLVKPDQNIQFWLEQFPQAWAETGGMGLAKQVPPQVILLKASATPVSVRQYPLSKEAQEGIRPHIQRLIQQGILVPVQSPWNTPLLPVRKPGTNDYRPVQDLREVNKRVQDIHPTVPNPYNLLCALPPQRSWYTVLDLKDAFFCLRLAPTSQPLFAFEWRDPDTGRTGQLTWTRLPQGFKNSPTIFDEALHRDLANFRIQHPQVTLLQYVDDLLLAGATKQDCLEGTKALLLELSDLGYRVSAKKAQICRREVTYLGYSLRDGQRWLTEARKKTVVQIPAPTTAKQMREFLGTAGFCRLWIPGFATLAAPLYPLTKEKGEFSWAPEHQKAFDAIKKALLSAPALALPDVTKPFTLYVDERKGVARGVLTQTLGPWRRPVAYLSKKLDPVASGWPVCLKAIAAVAILVKDADKLTLGQNITVIAPHALENIVRQPPDRWMTNARMTHYQSLLLTERVTFAPPAALNPATLLPEETDEPVTHDCHQLLIEETGVRKDLTDIPLTGEVLTWFTDGSSYVVEGKRMAGAAVVDGTRTIWASSLPEGTSAQKAELMALTQALRLAEGKSINIYTDSRYAFATAHVHGAIYKQRGLLTSAGREIKNKEEILSLLEALHLPKRLAIIHCPGHQKAKDPISRGNQMADRVAKQAAQGVNLLPMIETPKAP

SEQ ID NO: 103 - DNA, 2061 bp, synthetic construct
  misc_feature 1..2061: note = Engineered reverse transcriptase variants
  source 1..2061: mol_type = other DNA
atgcatcaccatcaccatcatggtggtagcggagtgctgacccttcagctggatgatgaatatcgcttgtacagtccgctggtcaaaccagaccaaaacattcagttctggctcgaacagtttccgcaagcgtgggctgaaactgcaggcatgggcctggccaaacaggttcctcctcaggtaatccaattaaaggcatctgccacgccggtgtcagttcgtcagtatccgctgtcgaaagaagcgcaagaggggattcgcccacacgtgcagcgtttgatccagcagggcattctggtaccggttcaaagcccctggaataccccgcttttaccagtccgcaaaccgggtacaaacgattaccgtcctgtgcaagacctgcgcgaagtcaataaacgtgtgcaggatatccacccaaccgttccgaacccgtataatctgttgtgcgcgttaccgccgcagcgttcctggtacacggtgctggacctgaaggacgcgttcttctgtcttcgtctccaccccaccagccagccactgtttgcctttgaatggcgcgatcctgatacgggccgtactgggcaattaacatggacccgtttgccgcagggctttaagaacagtcccaccatttttgatgaggctcttcaccgcgacctcgcaaatttccgcatccaacacccacaggtaacgttactccagtatgtcgatgatcttttgttagcgggtgccaccaaacaggactgcttggaaggaacgaaagcacttctcttggaactctcggatttaggttatcgtgtgtccgccaagaaagctcagatttgtcgccgcgaagtgacatacttaggctattcattgcgtgatggtcaacgttggcttactgaggcgcgcaaggagaccgttgttcaaatccccgcccctaccaccgcgaaacagatgcgtgaatttcttggcacggcaggtttctgccgtttgtggattcctggctttgctaccttagcggcacccctctatccactcacgaaagagaaaggagaattctcttgggccccagaacatcagaaagcgtttgacgccatcaagaaagcgttattaagcgctcctgctcttgcattgcccgatgtcaccaaaccattcacgctctacgtggatgaacgcaaaggcgtagcccgcggtgtgttgacacagaccttaggaccttggcgtcgtcccgtggcctacctctcgaagaaacttgacccagttgcaagtggttggcctgtctgcttgaaagctattgccgcagttgcaatcctcgtcaaagatgccgacaaacttactttgggccagaacattactgttattgcaccacacgcccttgaaaacatcgttcgtcagccacctgatcgctggatgaccaatgctcgcatgacgcattatcagagcctcttgcttaccgaacgcgtgacttttgctccacctgcagccttaaaccccgcaacccttttacccgaagaaacagatgagcctgtgacgcatgactgtcaccagctcttgattgaagaaactggcgtacgcaaagacctcaccgatattccattaacaggtgaggtacttacgtggtttaccgatgggtcctcttatgtcgtcgaaggcaaacgtatggctggtgccgccgttgttgatggcacccgtactatctgggcaagcagcttacccgaaggcacgagtgctcagaaagcagagttgatggccttgacccaagccttacgccttgctgaagggaaatcgatcaatatttacaccgactcacgctatgcattcgccacggcacatgtacacggtgccatctacaaacaacgtggtttgttaacttctgctggccgcgagattaagaacaaagaagaaatcctttccttacttgaagccttacacctccccaaacgtctcgctattattcattgtccagggcatcagaaagcaaaagatcctatcagccgtgggaatcagatggcagatcgtgtcgctaaacaggcagcccaaggcgttaacttgttgcccatgattgagacccctaaagctcca

SEQ ID NO: 104 - protein, 687 aa, synthetic construct
  REGION 1..687: note = Engineered reverse transcriptase variants
MHHHHHHGGSGVLTLQLDDEYRLYSPLVKPDQNIQFWLEQFPQAWAETAGMGLAKQVPPQVIQLKASATPVSVRQYPLSKEAQEGIRPHVQRLIQQGILVPVQSPWNTPLLPVRKPGTNDYRPVQDLREVNKRVQDIHPTVPNPYNLLCALPPQRSWYTVLDLKDAFFCLRLHPTSQPLFAFEWRDPDTGRTGQLTWTRLPQGFKNSPTIFDEALHRDLANFRIQHPQVTLLQYVDDLLLAGATKQDCLEGTKALLLELSDLGYRVSAKKAQICRREVTYLGYSLRDGQRWLTEARKETVVQIPAPTTAKQMREFLGTAGFCRLWIPGFATLAAPLYPLTKEKGEFSWAPEHQKAFDAIKKALLSAPALALPDVTKPFTLYVDERKGVARGVLTQTLGPWRRPVAYLSKKLDPVASGWPVCLKAIAAVAILVKDADKLTLGQNITVIAPHALENIVRQPPDRWMTNARMTHYQSLLLTERVTFAPPAALNPATLLPEETDEPVTHDCHQLLIEETGVRKDLTDIPLTGEVLTWFTDGSSYVVEGKRMAGAAVVDGTRTIWASSLPEGTSAQKAELMALTQALRLAEGKSINIYTDSRYAFATAHVHGAIYKQRGLLTSAGREIKNKEEILSLLEALHLPKRLAIIHCPGHQKAKDPISRGNQMADRVAKQAAQGVNLLPMIETPKAP

SEQ ID NO: 105 - DNA, 2061 bp, synthetic construct
  misc_feature 1..2061: note = Engineered reverse transcriptase variants
  source 1..2061: mol_type = other DNA
atgcatcaccatcaccatcatggtggtagcggagtgctgacccttcagctggatgatgaatatcgcttgtacagtccgctggtcaaaccagaccaaaacattcagttctggctcgaacagtttccgcaagcgtgggctgaaactggtggcatgggcctggccaaacaggttcctcctcaggtaatccaattaaaggcatctgccacgccggtgtcagttcgtcagtatccgctgtcgaaagaagcgcaagaggggattcgcccacacgtgcagcgtttgatccagcagggcattctggtaccggttcaaagcccctggaataccccgcttttaccagtccgcaaaccgggtacaaacgattaccgtcctgtgcaagacctgcgcgaagtcaataaacgtgtgcaggatatccacccaaccgttccgaacccgtataatctgttgtgcgcgttaccgccgcagcgttcctggtacacggtgctggacctgaaggacgcgttcttctgtcttcgcctccaccccaccagccagccactgtttgcctttgaatggcgcgatcctgatacgggccgtactgggcaattaacatggacccgtttgccgcagggctttaagaacagtcccaccatttttgatgaggctcttcaccgcgacctcgcaaatttccgcatccaacacccacaggtaacgttactccagtatgtcgatgatcttttgttagcgggtgccaccaaacaggactgcttggaaggaacgaaagcacttctcttggaactctcggatttaggttatcgtgtgtccgccaagaaagctcagatttgtcgccgcgaagtgacatacttaggctattcattgcgtgatggtcaacgttggcttactgaggcgcgcaagaagaccattgttcaaatccccgcccctaccaccgcgaaacagatgcgtgaatttcttggcacggcaggtttctgccgtttgtggattcctggctttgctaccttagcggcacccctctatccactcacgaaagagaaaggagaattctcttgggccccagaacatcagaaagcgtttgacgccatcaagaaagcgttattaagcgctcctgctcttgcattgcccgatgtcaccaaaccattcacgctctacgtggatgaacgcaaaggcgtagcccgcggtgtgttgacacagaccttaggaccttggcgtcgtcccgtggcctacctctcgaagaaacttgacccagttgcaagtggttggcctgtctgcttgaaagctattgccgcagttgcaatcctcgtcaaagatgccgacaaacttactttgggccagaacattactgttattgcaccacacgcccttgaagcaatcgttcgtcagccacctgatcgctggatgaccaatgctcgcatgacgcattatcagagcctcttgcttaccgaacgcgtgacttttgctccacctgcagccttaaaccccgcaacccttttacccgaagaaacagatgagcctgtgacgcatgactgtcaccagctcttgattgaagaaactggcgtacgcaaagacctcaccgatattccattaacaggtgaggtacttacgtggtttaccgatgggtcctcttatgtcgtcgaaggcaaacgtatggctggtgccgccgttgttgatggcacccgtactatctgggcaagcagcttacccgaaggcacgagtgctcagaaagcagagttgatggccttgacccaagccttacgccttgctgaagggaaatcgatcaatatttacaccgactcacgctatgcattcgccacggcacatgtacacggtgccatctacaaacaacgtggtttgttaacttctgctggccgcgagattaagaacaaagaagaaatcctttccttacttgaagccttacacctccccaaacgtctcgctattattcattgtccagggcatcagaaagcaaaagatcctatcagccgtgggaatcgtatggcagatcgtgtcgctaaacaggcagcccaaggcgttaacttgttgcccatgattgagacccctaaagctcca

SEQ ID NO: 106 - protein, 687 aa, synthetic construct
  REGION 1..687: note = Engineered reverse transcriptase variants
MHHHHHHGGSGVLTLQLDDEYRLYSPLVKPDQNIQFWLEQFPQAWAETGGMGLAKQVPPQVIQLKASATPVSVRQYPLSKEAQEGIRPHVQRLIQQGILVPVQSPWNTPLLPVRKPGTNDYRPVQDLREVNKRVQDIHPTVPNPYNLLCALPPQRSWYTVLDLKDAFFCLRLHPTSQPLFAFEWRDPDTGRTGQLTWTRLPQGFKNSPTIFDEALHRDLANFRIQHPQVTLLQYVDDLLLAGATKQDCLEGTKALLLELSDLGYRVSAKKAQICRREVTYLGYSLRDGQRWLTEARKKTIVQIPAPTTAKQMREFLGTAGFCRLWIPGFATLAAPLYPLTKEKGEFSWAPEHQKAFDAIKKALLSAPALALPDVTKPFTLYVDERKGVARGVLTQTLGPWRRPVAYLSKKLDPVASGWPVCLKAIAAVAILVKDADKLTLGQNITVIAPHALEAIVRQPPDRWMTNARMTHYQSLLLTERVTFAPPAALNPATLLPEETDEPVTHDCHQLLIEETGVRKDLTDIPLTGEVLTWFTDGSSYVVEGKRMAGAAVVDGTRTIWASSLPEGTSAQKAELMALTQALRLAEGKSINIYTDSRYAFATAHVHGAIYKQRGLLTSAGREIKNKEEILSLLEALHLPKRLAIIHCPGHQKAKDPISRGNRMADRVAKQAAQGVNLLPMIETPKAP

SEQ ID NO: 107 - DNA, 2061 bp, synthetic construct
  misc_feature 1..2061: note = Engineered reverse transcriptase variants
  source 1..2061: mol_type = other DNA
atgcatcaccatcaccatcatggtggtagcggagtgctgacccttcagctggatgatgaatatcgcttgtacagtccgctggtcaaaccagaccaaaacattcagttctggctcgaacagtttccgcaagcgtgggctgaaactgcaggcatgggcctggccaaacaggttcctcctcaggtaatccagttaaaggcatcttcgacgccggtgtcagttcgtcagtatccgctgtcgaaaaaggcgcaagaggggattcgcccacacgtgcagcgtttgatccagcagggcattctggtaccggttcaaagcccctggaataccccgcttttaccagtccgcaaaccgggtacaaacgattaccgtcctgtgcaagacctgcgcgaagtcaataaacgtgtgcaggatatccacccaaccgttccgaacccgtataatctgttgtgcgcgttaccgccgcagcgttcctggtacacggtgctggacctgaaggacgcgtacttctgtcttcgcctccaccccaccagccagccactgtttgcctttgaatggcgcgatcctgatacgggccgtactgggcaattaacatggacccgtttgccgcagggctttaagaacagtcccaccatttttgatgaggctcttcaccgcgacctcgcaaatttccgcatccaacacccacaggtaacgttactccagtatgtcgatgatcttttgttagcgggtgccaccaaacaggactgcttggaaggaacgaaagcacttctcttggaactctcggatttaggttatcgtgtgtccgccaagaaagctcagatttgtcgccgcgaagtgacatacttaggctattcattgcgtgatggtcaacgttggcttactgaggcgcgcaagcgcaccgttgttcaaatccccgcccctaccaccgcgaaacagatgcgtgaatttcttggcacggcaggtttctgccgtttgtggattcctggctttgctaccttagcggcacccctctatccactcacgaaagagaaaggagaattctcttgggccccagaacatcagaaagcgtttgacgccatcaagaaagcgttattaagcgctcctgctcttgcattgcccgatgtcaccaaaccattcacgctctacgtggatgaacgcaaaggcgtagcccgcggtgtgttgacacagaccttaggaccttggcgtcgtcccgtggcctacctctcgaagaaacttgacccagttgcaagtggttggcctgtctgcttgaaagctattgccgcagttgcaatcctcgtcaaagatgccgacaaacttactttgggccagaacattactgttattgcaccacacgcccttgaaaacatcgttcgtcagccacctgatcgctggatgaccaatgctcgcatgacgcattatcagagcctcttgcttaccgaacgcgtgacttttgctccacctgcagccttaaaccccgcaacccttttacccgaagaaacagatgagcctgtgacgcatgactgtcaccagctcttgattgaagaaactggcgtacgcaaagacctcaccgatattccattaacaggtgaggtacttacgtggtttaccaacgggtcctcttatgtcgtcgaaggcaaacgtatggctggtgccgccgttgttgatggcacccgtactatctgggcaagcagcttacccgaaggcacgagtgctcagaaagcagaattgatggccttgacccaagccttacgccttgctgaagggaaatcgatcaatatttacaccgactcacgctatgcattcgccacggcacatgtacacggtgccatctacaaacaacgtggtttgttaacttctgctggccgcgagattaagaacaaagaagaaatcctttccttacttgaagccttacacctccccaaacgtctcgctattattcattgtccagggcatcagaaagcaaaagatcctatcagccgtgggaatcaaatggcagatcgtgtcgctaaacaggcagcccaaggcgttaacttgttgcccatgattgagacccctaaagctcca

SEQ ID NO: 108 - protein, 687 aa, synthetic construct
  REGION 1..687: note = Engineered reverse transcriptase variants
MHHHHHHGGSGVLTLQLDDEYRLYSPLVKPDQNIQFWLEQFPQAWAETAGMGLAKQVPPQVIQLKASSTPVSVRQYPLSKKAQEGIRPHVQRLIQQGILVPVQSPWNTPLLPVRKPGTNDYRPVQDLREVNKRVQDIHPTVPNPYNLLCALPPQRSWYTVLDLKDAYFCLRLHPTSQPLFAFEWRDPDTGRTGQLTWTRLPQGFKNSPTIFDEALHRDLANFRIQHPQVTLLQYVDDLLLAGATKQDCLEGTKALLLELSDLGYRVSAKKAQICRREVTYLGYSLRDGQRWLTEARKRTVVQIPAPTTAKQMREFLGTAGFCRLWIPGFATLAAPLYPLTKEKGEFSWAPEHQKAFDAIKKALLSAPALALPDVTKPFTLYVDERKGVARGVLTQTLGPWRRPVAYLSKKLDPVASGWPVCLKAIAAVAILVKDADKLTLGQNITVIAPHALENIVRQPPDRWMTNARMTHYQSLLLTERVTFAPPAALNPATLLPEETDEPVTHDCHQLLIEETGVRKDLTDIPLTGEVLTWFTNGSSYVVEGKRMAGAAVVDGTRTIWASSLPEGTSAQKAELMALTQALRLAEGKSINIYTDSRYAFATAHVHGAIYKQRGLLTSAGREIKNKEEILSLLEALHLPKRLAIIHCPGHQKAKDPISRGNQMADRVAKQAAQGVNLLPMIETPKAP

SEQ ID NO: 109 - DNA, 2061 bp, synthetic construct
  misc_feature 1..2061: note = Engineered reverse transcriptase variants
  source 1..2061: mol_type = other DNA
atgcatcaccatcaccatcatggtggtagcggagtgctgacccttcagctggatgatgaatatcgcttgtacagtccgctggtcaaaccagaccaaaacattcagttctggctcgaacagtttccgcaagcgtgggctgaaactggtggcatgggcctggccaaacaggttcctcctcaggtaatccaattaaaggcatctgccacgccggtgtcagttcgtcagtatccgctgtcgaaagaagcgcaagaggggattcgcccacacgtgcagcgtttgatccagcagggcattctggtaccggttcaaagcccctggaataccccgcttttaccagtccgcaaaccgggtacaaacgattaccgtcctgtgcaagacctgcgcgaagtcaataaacgtgtgcaggatatccacccaaccgttccgaacccgtataatctgttgtgcgcgttaccgccgcagcgttcctggtacacggtgctggacctgaaggacgcgttcttctgtcttcgtctccaccccaccagccagccactgtttgcctttgaatggcgcgatcctgatacgggccgtactgggcaattaacatggacccgtttgccgcagggctttaagaacagtcccaccatttttgatgaggctcttcaccgcgacctcgcaaatttccgcatccaacacccacaggtaacgttactccagtatgtcgatgatcttttgttagcgggtgccaccaaacaggactgcttggaaggaacgaaagcacttctcttggaactctcggatttaggttatcgtgtgtccgccaagaaagctcagatttgtcgccgcgaagtgacatacttaggctattcattgcgtgatggtcaacgttggcttactgaggcgcgcaagaagaccgttgttcaaatccccgcccctaccaccgcgaagcagatgcgtgaatttcttggcacggcaggtttctgccgtttgtggattcctggctttgctaccttagcggcacccctctatccactcacgaaagagaaaggagaattctcttgggccccagaacatcagaaagcgtttgacgccatcaagaaagcgttattaagcgctcctgctcttgcattgcccgatgtcaccaaaccattcacgctctacgtggatgaacgcaaaggcgtagcccgcggtgtgttgacacagaccttaggaccttggcgtcgtcccgtggcctacctctcgaagaaacttgacccagttgcaagtggttggcctgtctgcttgaaagctattgccgcagttgcaatcctcgtcaaagatgccgacaaacttactttgggccagaacatcactgttattgcaccacacgcccttgaagcaatcgttcgtcagccacctgatcgctggatgaccaatgctcgcatgacgcattatcagagcctcttgcttaccgagcgcgtgacttttgctccacctgcagccttaaaccccgcaacccttttacccgaagaaacagatgagcctgtgacgcatgactgtcaccagctcttgattgaagaaactggcgtacgcaaagacctcaccgatattccattaacaggtgaggtacttacgtggtttaccgatgggtcctcttatgtcgtcgaaggcaaacgtatggctggtgccgccgttgttgatggcacccgtactatctgggcaagcagcttacccgaaggcacgagtgctcagaaagcagagttgatggccttgacccaagccttacgccttgctgaagggaaatcgatcaatatttacaccgactcacgctatgcattcgccacggcacatgtacacggtgccatctacaaacaacgtggtttgttaacttctgctggccgcgagattaagaacaaagaagaaatcctttccttacttgaagccttacacctccccaaacgtctcgctattattcattgtccagggcatcagaaagcaaaagatcctatcagccgtgggaatcagatggcagatcgtgtcgctaaacaggcagcccaaggcgttaacttgttgcccatgattgagacccctaaagctcca

SEQ ID NO: 110 - protein, 687 aa, synthetic construct
  REGION 1..687: note = Engineered reverse transcriptase variants
MHHHHHHGGSGVLTLQLDDEYRLYSPLVKPDQNIQFWLEQFPQAWAETGGMGLAKQVPPQVIQLKASATPVSVRQYPLSKEAQEGIRPHVQRLIQQGILVPVQSPWNTPLLPVRKPGTNDYRPVQDLREVNKRVQDIHPTVPNPYNLLCALPPQRSWYTVLDLKDAFFCLRLHPTSQPLFAFEWRDPDTGRTGQLTWTRLPQGFKNSPTIFDEALHRDLANFRIQHPQVTLLQYVDDLLLAGATKQDCLEGTKALLLELSDLGYRVSAKKAQICRREVTYLGYSLRDGQRWLTEARKKTVVQIPAPTTAKQMREFLGTAGFCRLWIPGFATLAAPLYPLTKEKGEFSWAPEHQKAFDAIKKALLSAPALALPDVTKPFTLYVDERKGVARGVLTQTLGPWRRPVAYLSKKLDPVASGWPVCLKAIAAVAILVKDADKLTLGQNITVIAPHALEAIVRQPPDRWMTNARMTHYQSLLLTERVTFAPPAALNPATLLPEETDEPVTHDCHQLLIEETGVRKDLTDIPLTGEVLTWFTDGSSYVVEGKRMAGAAVVDGTRTIWASSLPEGTSAQKAELMALTQALRLAEGKSINIYTDSRYAFATAHVHGAIYKQRGLLTSAGREIKNKEEILSLLEALHLPKRLAIIHCPGHQKAKDPISRGNQMADRVAKQAAQGVNLLPMIETPKAP

SEQ ID NO: 111 - DNA, 2061 bp, synthetic construct
  misc_feature 1..2061: note = Engineered reverse transcriptase variants
  source 1..2061: mol_type = other DNA
atgcatcaccatcaccatcatggtggtagcggagtgctgacccttcagctggatgatgaatatcgcttgtacagtccgctggtcaaaccagaccaaaacattcagttctggctcgaacagtttccgcaagcgtgggctgaaactgcaggcatgggcctggccaaacaggttcctcctcaggtaatccagttaaaggcatctgcgacgccggtgtcagttcgtcagtatccgctgtcgaaaaaggcgcaagaggggattcgcccacacgtgcagcgtttgatccagcagggcattctggtaccggttcaaagcccctggaataccccgcttttaccagtccgcaaaccgggtacaaacgattaccgtcctgtgcaagacctgcgcgaagtcaataaacgtgtgcaggatatccacccaaccgttccgaacccgtataatctgttgtgcgcgttaccgccgcagcgttcctggtacacggtgctggacctgaaggacgcgttcttctgtcttcgcctccaccccaccagccagccactgtttgcctttgaatggcgcgatcctgatacgggccgtactgggcaattaacatggacccgtttgccgcagggctttaagaacagtcccaccatttttgatgaggctcttcaccgcgacctcgcaaatttccgcatccaacacccacaggtaacgttactccagtatgtcgatgatcttttgttagcgggtgccaccaaacaggactgcttggaaggaacgaaagcacttctcttggaactctcggatttaggttatcgtgtgtccgccaagaaagctcagatttgtcgccgcgaagtgacatacttaggctattcattgcgtgatggtcaacgttggcttactgaggcgcgcaagaagaccgttgttcaaatccccgcccctaccaccgcgaaacagatgcgtgaatttcttggcacggcaggtttctgccgtttgtggattcctggctttgctaccttagcggcacccctctatccactcacgaaagagaaaggagaattctcttgggccccagaacatcagaaagcgtttgacgccatcaagaaagcgttattaagcgctcctgctcttgcattgcccgatgtcaccaaaccattcacgctctacgtggatgaacgcaaaggcgtagcccgcggtgtgttgacacagaccttaggaccttggcgtcgtcccgtggcctacctctcgaagaaacttgacccagttgcaagtggttggcctgtctgcttgaaagctattgccgcagttgcaatcctcgtcaaagatgccgacaaacttactttgggccagaacattactgttattgcaccacacgcccttgaaaacatcgttcgtcagccacctgatcgctggatgaccaatgctcgcatgacgcattatcagagcctcttgcttaccgaacgcgtgacttttgctccacctgcagccttaaaccccgcaacccttttacccgaagaaacagatgagcctgtgacgcatgactgtcaccagctcttgattgaagaaactggcgtacgcaaagacctcaccgatattccattaacaggtgaggtacttacgtggtttaccgatgggtcctcttatgtcgtcgaaggcaaacgtatggctggtgccgccgttgttgatggcacccgtactatctgggcaagcagcttacccgaaggcacgagtgctcagaaagcagagttgatggccttgacccaagccttacgccttgctgaagggaaatcgatcaatatttacaccgactcacgctatgcattcgccacggcacatgtacacggtgccatctacaaacaacgtggtttgttaacttctgctggccgcgagattaagaacaaagaagaaatcctttccttacttgaagccttacacctccccaaacgtctcgctattattcattgtccagggcatcagaaagcaaaagatcctatcagccgtgggaatcaaatggcagatcgtgtcgctaaacaggcagcccaaggcgttaacttgttgcccatgattgagacccctaaagctcca

SEQ ID NO: 112 - protein, 687 aa, synthetic construct
  REGION 1..687: note = Engineered reverse transcriptase variants
MHHHHHHGGSGVLTLQLDDEYRLYSPLVKPDQNIQFWLEQFPQAWAETAGMGLAKQVPPQVIQLKASATPVSVRQYPLSKKAQEGIRPHVQRLIQQGILVPVQSPWNTPLLPVRKPGTNDYRPVQDLREVNKRVQDIHPTVPNPYNLLCALPPQRSWYTVLDLKDAFFCLRLHPTSQPLFAFEWRDPDTGRTGQLTWTRLPQGFKNSPTIFDEALHRDLANFRIQHPQVTLLQYVDDLLLAGATKQDCLEGTKALLLELSDLGYRVSAKKAQICRREVTYLGYSLRDGQRWLTEARKKTVVQIPAPTTAKQMREFLGTAGFCRLWIPGFATLAAPLYPLTKEKGEFSWAPEHQKAFDAIKKALLSAPALALPDVTKPFTLYVDERKGVARGVLTQTLGPWRRPVAYLSKKLDPVASGWPVCLKAIAAVAILVKDADKLTLGQNITVIAPHALENIVRQPPDRWMTNARMTHYQSLLLTERVTFAPPAALNPATLLPEETDEPVTHDCHQLLIEETGVRKDLTDIPLTGEVLTWFTDGSSYVVEGKRMAGAAVVDGTRTIWASSLPEGTSAQKAELMALTQALRLAEGKSINIYTDSRYAFATAHVHGAIYKQRGLLTSAGREIKNKEEILSLLEALHLPKRLAIIHCPGHQKAKDPISRGNQMADRVAKQAAQGVNLLPMIETPKAP

SEQ ID NO: 113 - DNA, 2061 bp, synthetic construct
  misc_feature 1..2061: note = Engineered reverse transcriptase variants
  source 1..2061: mol_type = other DNA
atgcatcaccatcaccatcatggtggtagcggagtgctgacccttcagctggatgatgaatatcgcttgtacagtccgctggtcaaaccagaccaaaacattcagttctggctcgaacagtttccgcaagcgtgggctgaaactggtggcatgggcctggccaaacaggttcctcctcaggtaatccagttaaaggcatctgccacgccggtgtcagttcgtcagtatccgctgtcgaaagaagcgcaagaggggattcgcccacacgttcagcgtttgatccagcagggcattctggtaccggttcaaagcccctggaataccccgcttttaccagtcaaaaaaccgggtacaaacgattaccgtcctgtgcaagacctgcgcgaagtcaataaacgtgtgcaggatatccacccaaccgttccgaacccgtataatctgttgtgcgcgttaccgccgcagcgttcctggtacacggtgctggacctgaaggacgcgttcttctgtcttcgcctcgcacccaccagccagccactgtttgcctttgaatggcgcgatcctgatacgggccgtactgggcaattaacatggacccgtttgccgcagggctttaagaacagtcccaccatttttgatgaggctcttcaccgcgacctcgcaaatttccgcatccaacacccacaggtaacgttactccagtatgtcgatgatcttttgttagcgggtgccaccaaacaggactgcttggaaggaacgaaagcacttctcttggaactctcggatttaggttatcgtgtgtccgccaagaaagctcagatttgtcgccgcgaagtgacatacttaggctattcattgcgtgatggtcaacgttggcttactgaggcgcgcaagaagaccgttgttcaaatccccgcccctacgaccccgaaacagatgcgtgaatttcttggcacggcaggtttttgccgtttgtggattcctggctttgctaccttagcggcacccctctatccactcacgaaagagaaaggagaattctcttggggtccagaacatcagaaagcgtttgacgccatcaagaaagcgttattaagcgctcctgctcttgcattgcccgatgtcaccaaaccattcacgctctacgtggatgaacgcaaaggcgtagcccgcggtgtgttgacacagaccttaggaccttggcgtcgtcccgtggcctacctctcgaagaaacttgacccagttgcaagtggttggcctgtctgcttgaaagctattgccgcagttgcaatcctcgtcaaagatgccgacaaacttactttgggccagaacattactgttattgcaccacacgcccttgaaaacatcgttcgtcagccacctgatcgctggatgaccaatgctcgcatgacgcattatcagagcctcttgcttaccgaacgcgtgacttttgctccacctgcagccttaaaccccgcaacccttttacccgaagaaacagatgagcctgtgacgcatgactgtcaccagctcttgattgaagaaactggcgtacgcaaagacctcaccgatattccattaacaggtgaggtacttacgtggtttaccgaggggtcctcttatgtcgtcgaaggcaaacgtatggctggtgccgccgttgttgatggcacccgtactatctgggcaagcagcttacccgaaggcacgagtgctcagaaagcagatttgatggccttgacccaagccttacgccttgctgaagggaaatcgatcaatatttacaccgactcacgctatgcattcgccacggcacatgtacacggtgccatctacaaacaacgtggtttgttaacttctgctggccgcgagattaagaacaaagaagaaatcctttccttacttgaagccttacacctccccaaacgtctcgctattattcattgtccagggggtcagaaagcaaaagatcctatcagccgtgggaatcaaatggcagatcgtgtcgctaaacaggcagcccaaggcgttaacttgttgcccatgattgagacccctaaagctcca

SEQ ID NO: 114 - protein, 687 aa, synthetic construct
  REGION 1..687: note = Engineered reverse transcriptase variants
MHHHHHHGGSGVLTLQLDDEYRLYSPLVKPDQNIQFWLEQFPQAWAETGGMGLAKQVPPQVIQLKASATPVSVRQYPLSKEAQEGIRPHVQRLIQQGILVPVQSPWNTPLLPVKKPGTNDYRPVQDLREVNKRVQDIHPTVPNPYNLLCALPPQRSWYTVLDLKDAFFCLRLAPTSQPLFAFEWRDPDTGRTGQLTWTRLPQGFKNSPTIFDEALHRDLANFRIQHPQVTLLQYVDDLLLAGATKQDCLEGTKALLLELSDLGYRVSAKKAQICRREVTYLGYSLRDGQRWLTEARKKTVVQIPAPTTPKQMREFLGTAGFCRLWIPGFATLAAPLYPLTKEKGEFSWGPEHQKAFDAIKKALLSAPALALPDVTKPFTLYVDERKGVARGVLTQTLGPWRRPVAYLSKKLDPVASGWPVCLKAIAAVAILVKDADKLTLGQNITVIAPHALENIVRQPPDRWMTNARMTHYQSLLLTERVTFAPPAALNPATLLPEETDEPVTHDCHQLLIEETGVRKDLTDIPLTGEVLTWFTEGSSYVVEGKRMAGAAVVDGTRTIWASSLPEGTSAQKADLMALTQALRLAEGKSINIYTDSRYAFATAHVHGAIYKQRGLLTSAGREIKNKEEILSLLEALHLPKRLAIIHCPGGQKAKDPISRGNQMADRVAKQAAQGVNLLPMIETPKAP

SEQ ID NO: 115 - DNA, 2061 bp, synthetic construct
  misc_feature 1..2061: note = Engineered reverse transcriptase variants
  source 1..2061: mol_type = other DNA
atgcatcaccatcaccatcatggtggtagcggagtgctgacccttcagctggatgatgaatatcgcttgtacagtccgctggtcaaaccagaccaaaacattcagttctggctcgaacagtttccgcaagcgtgggctgaaactgcaggcatgggcctggccaaacaggttcctcctcaggtaatccaattaaaggcatctgccacgccggtgtcagttcgtcagtatccgctgtcgaaagaggcgcaagaggggattcgcccacacgtgcagcgtttgatccagcagggcattctggtaccggttcaaagcccctggaataccccgcttttaccagtccgcaaaccgggtacaaacgattaccgtcctgtgcaagacctgcgcgaagtcaataaacgtgtgcaggatatccacccaaccgttccgaacccgtataatctgttgtgcgcgttaccgccgcagcgttcctggtacacggtgctggacctgaaggacgcgtacttctgtcttcgcctccaccccaccagccagccactgtttgcctttgaatggcgcgatcctgatacgggccgtactgggcaattaacatggacccgtttgccgcagggctttaagaacagtcccaccatttttgatgaggctcttcaccgcgacctcgcaaatttccgcatccaacacccacaggtaacgttactccagtatgtcgatgatcttttgttagcgggtgccaccaaacaggactgcttggaaggaacgaaagcacttctcttggaactctcgaacttaggttatcgtgtgtccgccaagaaagctcagatttgtcgccgcgaagtgacatacttaggctattcattgcgtgatggtcaacgttggcttactgaggcgcgcaagaagaccgttgttcaacagcccgcccctaccaccgcgaaacagatgcgtgaatttcttggcacggcaggtttctgccgtttgtggattcctggctttgctaccttagcggcacccctctatccactcacgaaagagaaaggagaattctcttgggccccagaacatcagaaagcgtttgacgccatcaagaaagcgttattaagcgctcctgctcttgcattgcccgatgtcaccaaaccattcacgctctacgtggatgaacgcaaaggcgtagcccgcggtgtgttgacacagaccttaggaccttggcgtcgtcccgtggcctacctctcgaagaaacttgacccagttgcaagtggttggcctgtctgcttgaaagctattgccgcagttgcaatcctcgtcaaagatgccgacaaacttactttgggccagaacattactgttatcgcaccacacgcccttgaaaacatcgttcgtcagccacctgatcgctggatgaccaatgctcgcatgacgcattatcagagcctcttgcttaccgaacgcgtgacttttgctccacctgcagccttaaaccccgcaacccttttacccgaagaaacagatgagcctgtgacgcatgactgtcaccagctcttgattgaagaaactggcgtacgcaaagacctcaccgatattccattaacaggtgaggtacttacgtggtttaccaacgggtcctcttatgtcgtcgaaggcaaacgtatggctggtgccgccgttgttgatggcacccgtactatctgggcaagcagcttacccgaaggcacgagtgctcagaaagcagagttgatggccttgacccaagccttacgccttgctgaagggaaatcgatcaatatttacaccgactcacgctatgcattcgccacggcacatgtacacggtgccatctacaaacaacgtggtttgttaacttctgctggccgcgagattaagaacaaagaagaaatcctttccttacttgaagccttacacctccccaaacgtctcgctattattcattgtccagggcatcagaaagcaaaagatcctatcagccgtgggaatcaaatggcagatcgtgtcgctaaacaggcagcccaaggcgttaacttgttgcccatgattgagacccctaaagctcca

SEQ ID NO: 116 - protein, 687 aa, synthetic construct
  REGION 1..687: note = Engineered reverse transcriptase variants
MHHHHHHGGSGVLTLQLDDEYRLYSPLVKPDQNIQFWLEQFPQAWAETAGMGLAKQVPPQVIQLKASATPVSVRQYPLSKEAQEGIRPHVQRLIQQGILVPVQSPWNTPLLPVRKPGTNDYRPVQDLREVNKRVQDIHPTVPNPYNLLCALPPQRSWYTVLDLKDAYFCLRLHPTSQPLFAFEWRDPDTGRTGQLTWTRLPQGFKNSPTIFDEALHRDLANFRIQHPQVTLLQYVDDLLLAGATKQDCLEGTKALLLELSNLGYRVSAKKAQICRREVTYLGYSLRDGQRWLTEARKKTVVQQPAPTTAKQMREFLGTAGFCRLWIPGFATLAAPLYPLTKEKGEFSWAPEHQKAFDAIKKALLSAPALALPDVTKPFTLYVDERKGVARGVLTQTLGPWRRPVAYLSKKLDPVASGWPVCLKAIAAVAILVKDADKLTLGQNITVIAPHALENIVRQPPDRWMTNARMTHYQSLLLTERVTFAPPAALNPATLLPEETDEPVTHDCHQLLIEETGVRKDLTDIPLTGEVLTWFTNGSSYVVEGKRMAGAAVVDGTRTIWASSLPEGTSAQKAELMALTQALRLAEGKSINIYTDSRYAFATAHVHGAIYKQRGLLTSAGREIKNKEEILSLLEALHLPKRLAIIHCPGHQKAKDPISRGNQMADRVAKQAAQGVNLLPMIETPKAP

SEQ ID NO: 117 - DNA, 2061 bp, synthetic construct
  misc_feature 1..2061: note = Engineered reverse transcriptase variants
  source 1..2061: mol_type = other DNA
atgcatcaccatcaccatcatggtggtagcggagtgctgacccttcagctggaggatgaatatcgcttgtacagtccgctggtcaaaccagaccaaaacattcagttctggctcgaacagtttccgcaagcgtgggctgaaactgcaggcatgggcctggccaaacaggttcctcctcaggtaatccaattaaaggcatctgccacgccggtgtcagttcgtcagtatccgctgtcgaaagaagcgcaagaggggattcgcccacacgtgcagcgtttgattcagcagggcattctggtaccgtgtcaaagcccctggaataccccgcttttaccagtccgcaaaccgggtacaaacgattaccgtcctgtgcaagacctgcgcgaagtcaataaacgtgtgcaggatatccacccaaccgttccgaacccgtataatctgttgtgcgcgttaccgccgcagcgttcctggtacacggtgctggacctgaaggacgcgttcttctgtcttcgcctccaccccaccagccagccactgtttgcctttgaatggcgcgatcctgatacgggccgtactgggcaattaacatggacccgtttgccgcagggctttaagaacagtcccaccatttttgatgaggctcttcaccgcgacctcgcaaatttccgcatccaacacccacaggtaacgttactccagtatgtcgatgatcttttgttagcgggtgccaccaaacaggactgcttggaaggaacgaaagcacttctcttggaactctcggatttaggttatcgtgtgtccgccaagaaagctcagatttgtcgccgcgaagtgacatacttaggctattcattgcgtgatggtcaacgttggcttactgaggcgcgcaagaagaccgttgttcaaatccccgcccctaccaccgcgaaacagatgcgtgaatttcttggcacggcaggtttctgccgtttgtggattcctggctttgctaccttagcggcacccctctatccactcacgaaagagaaaggagaattctcttgggccccagaacatcagaaagcgtttgacgccatcaagaaagcgttattaagcgctcctgctcttgcattgcccgatgtcaccaaaccattcacgctctacgtggatgaacgcaaaggcgtagcccgcggtgtgttgacacagaccttaggaccttggcgtcgtcccgtggcctacctctcgaagaaacttgacccagttgcaagtggttggcctgtctgcttgaaagctattgccgcagttgcaatcctcgtcaaagatgccgacaaacttactttgggccagaacattactgttattgcaccacacgcccttgaaaacatcgttcgtcagccacctgatcgctggatgaccaatgctcgcatgacgcattatcagagcctcttgcttaccgaacgcgtgacttttgctccacctgcagccttaaaccccgcaacccttttacccgaagaaacagatgagcctgtgacgcatgactgtcaccagctcttgattgaagaaactggcgtacgcaaagacctcaccgatattccattaacaggtgaggtacttacgtggtttaccgatgggtcctcttatgtcgtcgaaggcaaacgtatggctggtgccgccgttgttactggcacccgtactatctgggcaagcagcttacccgaaggcacgagtgctcagaaagcagagttgatggccttgacccaagccttacgccttgctgaagggaaatcgatcaatatttacaccgactcacgctatgcattcgccacggcacatgtacacggtgccatctacaaacaacgtggtttgttaacttctgctggccgcgagattaagaacaaagaagaaatcctttccttacttgaagccttacacctccccaaacgtctcgctattattcattgtccagggcatcagaaagcaaaagatcctatcagccgtgggaatcaaatggcagatcgtgtcgctaaacaggcagcccaaggcgttaacttgttgcccatgattgagacccctaaagctcca

SEQ ID NO: 118 - protein, 687 aa, synthetic construct
  REGION 1..687: note = Engineered reverse transcriptase variants
MHHHHHHGGSGVLTLQLEDEYRLYSPLVKPDQNIQFWLEQFPQAWAETAGMGLAKQVPPQVIQLKASATPVSVRQYPLSKEAQEGIRPHVQRLIQQGILVPCQSPWNTPLLPVRKPGTNDYRPVQDLREVNKRVQDIHPTVPNPYNLLCALPPQRSWYTVLDLKDAFFCLRLHPTSQPLFAFEWRDPDTGRTGQLTWTRLPQGFKNSPTIFDEALHRDLANFRIQHPQVTLLQYVDDLLLAGATKQDCLEGTKALLLELSDLGYRVSAKKAQICRREVTYLGYSLRDGQRWLTEARKKTVVQIPAPTTAKQMREFLGTAGFCRLWIPGFATLAAPLYPLTKEKGEFSWAPEHQKAFDAIKKALLSAPALALPDVTKPFTLYVDERKGVARGVLTQTLGPWRRPVAYLSKKLDPVASGWPVCLKAIAAVAILVKDADKLTLGQNITVIAPHALENIVRQPPDRWMTNARMTHYQSLLLTERVTFAPPAALNPATLLPEETDEPVTHDCHQLLIEETGVRKDLTDIPLTGEVLTWFTDGSSYVVEGKRMAGAAVVTGTRTIWASSLPEGTSAQKAELMALTQALRLAEGKSINIYTDSRYAFATAHVHGAIYKQRGLLTSAGREIKNKEEILSLLEALHLPKRLAIIHCPGHQKAKDPISRGNQMADRVAKQAAQGVNLLPMIETPKAP

SEQ ID NO: 119 - DNA, 2061 bp, synthetic construct
  misc_feature 1..2061: note = Engineered reverse transcriptase variants
  source 1..2061: mol_type = other DNA
atgcatcaccatcaccatcatggtggtagcggagtgctgacccttcagctggatgatgaatatcgcttgtacagtccgctggtcaaaccagaccaaaacattcagttctggctcgaacagtttccgcaagcgtgggctgaaactgctggcatgggcctggccaaacaggttcctcctcaggtaatccaattaaaggcatctgccacgccggtgtcagttcgtcagtatccgctgtcgaaagaagcgcaagaggggattcgcccacacgttcagcgtttgatccagcagggcattctggtaccggttcaaagcccctggaataccccgcttttaccagtccgcaaaccgggtacaaacgattaccgtcctgtgcaagacctgcgcgaagtcaataaacgtgtgcaggatatccacccaaccgttccgaacccgtataatctgttgtgcgcgttaccgccgcagcgttcctggtacacggtgctggacctgaaggacgcgttcttctgtcttctcctcgcacccaccagccagccactgtttgcctttgaatggcgcgatcctgatacgggccgtactgggcaattaacatggacccgtttgccgcagggctttaagaacagtcccaccatttttgatgaggctcttcaccgcgacctcgcaaatttccgcatccaacacccacaggtaacgttactccagtatgtcgatgatcttttgttagcgggtgccaccaaacaggactgcttggaaggaacgaaagcacttctcttggaactctcggatttaggttatcgtgtgtccgccaagaaagctcagatttgtcgccgcgaagtgacatacttaggctattcattgcgtgatggtcaacgttggcttactgaggcgcgcaagaagaccgttgttcaaatccccgcccctaagaccgcgaaacagatgcgtgaatttcttggcacggcaggtttctgccgtttgtggattcctggctttgctgaattagcggcacccctctatccactcacgaaagagaaaggagaattctcttgggccccagaacatcagaaagcgtttgacgccatcaagaaagcgttattaagcgctcctgctcttgcattgcccgatgtcaccaaaccattcacgctctacgtggatgaacgcaaaggcgtagcccgcggtgtgttgacacagaccttaggaccttggcgtcgtcccgtggcctacctctcgaagaaacttgacccagttgcaagtggttggcctgtctgcttgaaagctattgccgcagttgcaatcctcgtcaaagatgccgacaaacttactttgggccagaacattactgttattgcaccacacgcccttgaaaacatcgttcgtcagccacctgatcgctggatgaccaatgctcgcatgacgcattatcagagcctcttgcttaccgaacgcgtgacttttgctccacctgcagccttaaaccccgcaacccttttacccgaagaaacagatgagcctgtgacgcatgactgtcaccagctcttgattgaagaaactggcgtacgcaaagacctcaccgatattccattaacaggtgaggtacttacgtggtttaccgaggggtcctcttatgtcgtcgaaggcaaacgtatggctggtgccgccgttgttgatggcacccgtactatctgggcaagcagcttacccgaaggcacgagtgctcagaaagcagagttgatggccttgacccaagccttacgccttgctgaagggaaatcgatcaatatttacaccgactcacgctatgcattcgccacggcacatgtacacggtgccatctacaaacaacgtggtttgttaacttctgctggccgcgagattaagaacaaagaagaaatcctttccttacttgaagccttacacctccccaaacgtctcgctattattcattgtccagggcatcagaaagcaaaagatcctatcagccgtgggaatcaaatggcagatcgtgtcgctaaacaggcagcccaaggcgttaacttgttgcccatgattgagacccctaaagctcca

SEQ ID NO: 120 - protein, 687 aa, synthetic construct
  REGION 1..687: note = Engineered reverse transcriptase variants
MHHHHHHGGSGVLTLQLDDEYRLYSPLVKPDQNIQFWLEQFPQAWAETAGMGLAKQVPPQVIQLKASATPVSVRQYPLSKEAQEGIRPHVQRLIQQGILVPVQSPWNTPLLPVRKPGTNDYRPVQDLREVNKRVQDIHPTVPNPYNLLCALPPQRSWYTVLDLKDAFFCLLLAPTSQPLFAFEWRDPDTGRTGQLTWTRLPQGFKNSPTIFDEALHRDLANFRIQHPQVTLLQYVDDLLLAGATKQDCLEGTKALLLELSDLGYRVSAKKAQICRREVTYLGYSLRDGQRWLTEARKKTVVQIPAPKTAKQMREFLGTAGFCRLWIPGFAELAAPLYPLTKEKGEFSWAPEHQKAFDAIKKALLSAPALALPDVTKPFTLYVDERKGVARGVLTQTLGPWRRPVAYLSKKLDPVASGWPVCLKAIAAVAILVKDADKLTLGQNITVIAPHALENIVRQPPDRWMTNARMTHYQSLLLTERVTFAPPAALNPATLLPEETDEPVTHDCHQLLIEETGVRKDLTDIPLTGEVLTWFTEGSSYVVEGKRMAGAAVVDGTRTIWASSLPEGTSAQKAELMALTQALRLAEGKSINIYTDSRYAFATAHVHGAIYKQRGLLTSAGREIKNKEEILSLLEALHLPKRLAIIHCPGHQKAKDPISRGNQMADRVAKQAAQGVNLLPMIETPKAP

SEQ ID NO: 121 - DNA, 2061 bp, synthetic construct
  misc_feature 1..2061: note = Engineered reverse transcriptase variants
  source 1..2061: mol_type = other DNA
atgcatcaccatcaccatcatggtggtagcggagtgctgacccttcagctggatgatgaatatcgcttgtacagtccgctggtcaaaccagaccaaaacattcagttctggctcgaacagtttccgcaagcgtgggctgaaactgctggcatgggcctggccaaacaggttcctcctcaggtaatccaattaaaggcatctgccacgccggtgtcagttcgtcagtatccgctgtcgaaagaagcgcaagaggggattcgcccacacgttcagcgtttgatccagcagggcattctggtaccggttcaaagcccctggaataccccgcttttaccagtccgcaaaccgggtacaaacgattaccgtcctgtgcaagacctgcgcgaagtcaataaacgtgtgcaggatatccacccaaccgttccgaacccgtataatctgttgtgcgcgttaccgccgcagcgttcctggtacacggtgctggacctgaaggacgcgttcttctgtcttcgcctcgcacccaccagccagccactgtttgcctttgaatggcgcgatcctgatacgggccgtactgggcaattaacatggacccgtttgccgcagggctttaagaacagtcccaccatttttgatgaggctcttcgtcgcgacctcgcaaatttccgcatccaacacccacaggtaacgttactccagtatgtcgatgatcttttgttagcgggtgccaccaaacaggactgcttggaaggaacgaaagcacttctcttggaactctcggatttaggttatcgtgtgtccgccaagaaagctcagatttgtcgccgcgaagtgacatacttaggctattcattgcgtgatggtcaacgttggcttactgaggcgcgcaagaagaccgttgttcaaatccccgcccctaccaccgcgaaacagatgcgtgaatttcttggcacggcaggtttttgccgtttgtggattcctggctttgctaccttagcggcacccctctatccactcacgaaagagaaaggagaattctcttgggctccagaacatcagaaagcgtttgacgccatcaagaaagcgttattaagcgctcctgctcttgcattgcccgatgtcaccaaaccattcacgctctacgtggatgaacgcaaaggcgtagcccgcggtgtgttgacacagaccttaggaccttggcgtcgtcccgtggcctacctctcgaagaaacttgacccagttgcaagtggttggcctgtctgcttgaaagctattgccgcagttgcaatcctcgtcaaagatgccgacaaacttactttgggccagaacattactgttattgcaccacacgcccttgaaaacatcgttcgtcagccacctgatcgctggatgaccaatgctcgcatgacgcattatcagagcctcttgcttaccgaacgcgtgacttttgctccacctgcagccttaaaccccgcaacccttttacccgaagaaacagatgagcctgtgacgcatgactgtcaccagctcttgattgaagaaactggcgtacgcaaagacctcaccgatattccattaacaggtgaggtacttacgtggtttaccgaggggtcctcttatgtcgtcgaaggcaaacgtatggctggtgccgccgttgttgatggcacccgtactatctgggcaagcagcttacccgaaggcacgagtgctcagaaagcagagttgatggccttgacccaagccttacgccttgctgaagggaaatcgatcaatatttacaccgactcacgctatgcattcgccacggcacatgtacacggtgccatctacaaacaacgtggtttgttaacttctgctggccgcgagattaagaacaaagaagaaatcctttccttacttgaagccttacacctccccaaacgtctcgctattattcattgtccagggcatcagaaagcaaaagatcctatcagccgtgggaatcaaatggcagatcgtgtcgctaaacaggcagcccaaggcgttaacttgttgcccatgattgagacccctaaagctcca

SEQ ID NO: 122 - protein, 687 aa, synthetic construct
  REGION 1..687: note = Engineered reverse transcriptase variants
MHHHHHHGGSGVLTLQLDDEYRLYSPLVKPDQNIQFWLEQFPQAWAETAGMGLAKQVPPQVIQLKASATPVSVRQYPLSKEAQEGIRPHVQRLIQQGILVPVQSPWNTPLLPVRKPGTNDYRPVQDLREVNKRVQDIHPTVPNPYNLLCALPPQRSWYTVLDLKDAFFCLRLAPTSQPLFAFEWRDPDTGRTGQLTWTRLPQGFKNSPTIFDEALRRDLANFRIQHPQVTLLQYVDDLLLAGATKQDCLEGTKALLLELSDLGYRVSAKKAQICRREVTYLGYSLRDGQRWLTEARKKTVVQIPAPTTAKQMREFLGTAGFCRLWIPGFATLAAPLYPLTKEKGEFSWAPEHQKAFDAIKKALLSAPALALPDVTKPFTLYVDERKGVARGVLTQTLGPWRRPVAYLSKKLDPVASGWPVCLKAIAAVAILVKDADKLTLGQNITVIAPHALENIVRQPPDRWMTNARMTHYQSLLLTERVTFAPPAALNPATLLPEETDEPVTHDCHQLLIEETGVRKDLTDIPLTGEVLTWFTEGSSYVVEGKRMAGAAVVDGTRTIWASSLPEGTSAQKAELMALTQALRLAEGKSINIYTDSRYAFATAHVHGAIYKQRGLLTSAGREIKNKEEILSLLEALHLPKRLAIIHCPGHQKAKDPISRGNQMADRVAKQAAQGVNLLPMIETPKAP

SEQ ID NO: 123 - DNA, 2061 bp, synthetic construct
  misc_feature 1..2061: note = Engineered reverse transcriptase variants
  source 1..2061: mol_type = other DNA
atgcatcaccatcaccatcatggtggtagcggagtgctgacccttcagctggaggatgaatatcgcttgtacagtccgctggtcaaaccagaccaaaacattcagttctggctcgaacagtttccgcaagcgtgggctgaaactgcaggcatgggcctggccaaacaggttcctcctcaggtaatccaattaaaggcatctgccacgccggtgtcagttcgtcagtatccgctgtcgaaagaagcgcaagaggggattcgcccacacgtgcagcgtttgattcagcagggcattctggtaccggtccaaagcccctggaataccccgcttttaccagtccgcaaaccgggtacaaacgattaccgtcctgtgcaagacctgcgcgaagtcaataaacgtgtgcaggatatccacccaaccgttccgaacccgtataatctgttgtgcgcgttaccgccgcagcgttcctggtacacggtgctggacctgaaggacgcgttcttctgtcttcgcctccaccccaccagccagccactgtttgcctttgaatggcgcgatcctgatacgggccgtactgggcaattaacatggacccgtttgccgcagggctttaagaacagtcccaccatttttgatgaggctcttcaccgcgacctcgcaaatttccgcatccaacacccacaggtaacgttactccagtatgtcgatgatcttttgttagcgggtgccaccaaacaggactgcttggaaggaacgaaagcacttctcttggaactctcggatttaggttatcgtgtgtccgccaagaaagctcagatttgtcgccgcgaagtgacatacttaggctattcattgcgtgatggtcaacgttggcttactgaggcgcgcaagaagaccgttgttcaaatccccgcccctaccaccgcgaaacagatgcgtgaatttcttggcacggcaggtttctgccgtttgtggattcctggctttgctaccttagcggcacccctctatccactcacgaaagagaaaggagaattctcttgggccccagaacatcagaaagcgtttgacgccatcaagaaagcgttattaagcgctcctgctcttgggttgcccgatgtcaccaaaccattcacgctctacgtggatgaacgcaaaggcgtagcccgcggtgtgttgacacagaccttaggaccttggcgtcgtcccgtggcctacctctcgaagaaacttgacccagttgcaagtggttggcctgtctgcttgaaagctattgccgcagttgcaatcctcgtcaaagatgccgacaaacttactttgggccagaacattactgttattgcaccacacgcccttgaaaacatcgttcgtcagccacctgatcgctggctgacgaatgctcgcatgacgcattatcagagcctcttgcttaccgaacgcgtgacttttgctccacctgcagccttaaaccccgcaacccttttacccgaagaaacagatgagcctgtgacgcatgactgtcacgagctcttgattgaagaaactggcgtacgcaaagacctcaccgatattccattaacaggtgaggtacttacgtggtttaccgatgggtcctcttatgtcgtcgaaggcaaacgtatggctggtgccgccgttgttgatggcacccgtactatctgggcaagcagcttacccgaaggcacgagtgctcagaaagcagagttgatggccttgacccaagccttacgccttgctgaagggaaatcgatcaatatttacaccgactcacgctatgcattcgccacggcacatgtacacggtgccatctacaaacaacgtggtttgttaacttctgctggccgcgagattaagaacaaagaagaaatcctttccttacttgaagccttacacctccccaaacgtctcgctattattcattgtccagggcatcagaaagcaaaagatcctatcagccgtgggaatcaaatggcagatcgtgtcgctaaacaggcagcccaaggcgttaacttgttgcccatgattgagacccctaaagctcca

SEQ ID NO: 124 - protein, 687 aa, synthetic construct
  REGION 1..687: note = Engineered reverse transcriptase variants
MHHHHHHGGSGVLTLQLEDEYRLYSPLVKPDQNIQFWLEQFPQAWAETAGMGLAKQVPPQVIQLKASATPVSVRQYPLSKEAQEGIRPHVQRLIQQGILVPVQSPWNTPLLPVRKPGTNDYRPVQDLREVNKRVQDIHPTVPNPYNLLCALPPQRSWYTVLDLKDAFFCLRLHPTSQPLFAFEWRDPDTGRTGQLTWTRLPQGFKNSPTIFDEALHRDLANFRIQHPQVTLLQYVDDLLLAGATKQDCLEGTKALLLELSDLGYRVSAKKAQICRREVTYLGYSLRDGQRWLTEARKKTVVQIPAPTTAKQMREFLGTAGFCRLWIPGFATLAAPLYPLTKEKGEFSWAPEHQKAFDAIKKALLSAPALGLPDVTKPFTLYVDERKGVARGVLTQTLGPWRRPVAYLSKKLDPVASGWPVCLKAIAAVAILVKDADKLTLGQNITVIAPHALENIVRQPPDRWLTNARMTHYQSLLLTERVTFAPPAALNPATLLPEETDEPVTHDCHELLIEETGVRKDLTDIPLTGEVLTWFTDGSSYVVEGKRMAGAAVVDGTRTIWASSLPEGTSAQKAELMALTQALRLAEGKSINIYTDSRYAFATAHVHGAIYKQRGLLTSAGREIKNKEEILSLLEALHLPKRLAIIHCPGHQKAKDPISRGNQMADRVAKQAAQGVNLLPMIETPKAP

SEQ ID NO: 125 - DNA, 2061 bp, synthetic construct
  misc_feature 1..2061: note = Engineered reverse transcriptase variants
  source 1..2061: mol_type = other DNA
atgcatcaccatcaccatcatggtggtagcggagtgctgacccttcagctggatgatgaatatcgcttgtacagtccgctggtcaaaccagaccaaaacattcagttctggctcgaacagtttccgcaagcgtgggctgaaactggtggcatgggcctggccaaacaggttcctcctcaggtaatccagttaaaggcatctgccacgccggtgtcagttcgtcagtatccgctgtcgaaagaagcgcaagaggggattcgcccacacgtgcagcgtttgatccagcagggcattctggtaccggttcaaagcccctggaataccccgcttttaccagtcaaaaaaccgggtacaaacgattaccgtcctgtgcaagacctgcgcgaagtcaataaacgtgtgcaggatatccacccaaccgttccgaacccgtataatctgttgtgcgcgttaccgccgcagcgttcctggtacacggtgctggacctgaaggacgcgttcttctgtcttcgcctccaccccaccagccagccactgtttgcctttgaatggcgcgatcctgatacgggccgtactgggcaattaacatggacccgtttgccgcagggctttaagaacagtcccaccatttttgatgaggctcttcaccgcgacctcgcaaatttccgcatccaacacccacaggtaacgttactccagtatgtcgatgatcttttgttagcgggtgccaccaaacaggactgcttggaaggaacgaaagcacttctcttggaactctcggatttaggttatcgtgtgtccgccaagaaagctcagatttgtcgccgcgaagtgacatacttaggctattcattgcgtgatggtcaacgttggcttactgaggcgcgcaagaagaccgttgttcaaatccccgcccctaccaccgcgaaacagatgcgtgaatttcttggcacggcaggtttctgccgtttgtggattcctggctttgctaccttagcggcacccctctatccactcacgaaagagaaaggagaattctcttgggccccagaacatcagaaagcgtttgacgccatcaagaaagcgttattaagcgctcctgctcttgcattgcccgatgtcaccaaaccattcacgctctacgtggatgaacgcaaaggcgtagcccgcggtgtgttgacacagaccttaggaccttggcgtcgtcccgtggcctacctctcgaagaaacttgacccagttgcaagtggttggcctgtctgcttgaaagctattgccgcagttgcaatcctcgtcaaagatgccgacaaacttactttgggccagaacattactgttattgcaccacacgcccttgaaaacatcgttcgtcagccacctgatcgctggatgaccaatgctcgcatgacgcattatcagagcctcttgcttaccgaacgcgtgacttttgctccacctgcagccttaaaccccgcaacccttttacccgaagaaacagatgagcctgtgacgcatgactgtcaccagctcttgattgaagaaactggcgtacgcaaagacctcaccgatattccattaacaggtgaggtacttacgtggtttaccgatgggtcctcttatgtcgtcgaaggcaaacgtatggctggtgccgccgttgttgatggcacccgtactatctgggcaagcagcttacccgaaggcacgagtgctcagaaagcagagttgatggccttgacccaagccttacgccttgctgaagggaaatcgatcaatatttacaccgactcacgctatgcattcgccacggcacatgtacacggtgccatctacaaacaacgtggtttgttaacttctgctggccgcgagattaagaacaaagaagaaatcctttccttacttgaagccttacacctccccaaacgtctcgctattattcattgtccagggcatcagaaagcaaaagatcctatcagccgtgggaatcaaatggcagatcgtgtcgctaaacaggcagcccaaggcgttaacttgttgcccatgattgagacccctaaagctcca

SEQ ID NO: 126 - protein, 687 aa, synthetic construct
  REGION 1..687: note = Engineered reverse transcriptase variants
MHHHHHHGGSGVLTLQLDDEYRLYSPLVKPDQNIQFWLEQFPQAWAETGGMGLAKQVPPQVIQLKASATPVSVRQYPLSKEAQEGIRPHVQRLIQQGILVPVQSPWNTPLLPVKKPGTNDYRPVQDLREVNKRVQDIHPTVPNPYNLLCALPPQRSWYTVLDLKDAFFCLRLHPTSQPLFAFEWRDPDTGRTGQLTWTRLPQGFKNSPTIFDEALHRDLANFRIQHPQVTLLQYVDDLLLAGATKQDCLEGTKALLLELSDLGYRVSAKKAQICRREVTYLGYSLRDGQRWLTEARKKTVVQIPAPTTAKQMREFLGTAGFCRLWIPGFATLAAPLYPLTKEKGEFSWAPEHQKAFDAIKKALLSAPALALPDVTKPFTLYVDERKGVARGVLTQTLGPWRRPVAYLSKKLDPVASGWPVCLKAIAAVAILVKDADKLTLGQNITVIAPHALENIVRQPPDRWMTNARMTHYQSLLLTERVTFAPPAALNPATLLPEETDEPVTHDCHQLLIEETGVRKDLTDIPLTGEVLTWFTDGSSYVVEGKRMAGAAVVDGTRTIWASSLPEGTSAQKAELMALTQALRLAEGKSINIYTDSRYAFATAHVHGAIYKQRGLLTSAGREIKNKEEILSLLEALHLPKRLAIIHCPGHQKAKDPISRGNQMADRVAKQAAQGVNLLPMIETPKAP

SEQ ID NO: 127 - DNA, 2061 bp, synthetic construct
  misc_feature 1..2061: note = Engineered reverse transcriptase variants
  source 1..2061: mol_type = other DNA
atgcatcaccatcaccatcatggtggtagcggagtgctgacccttcagctggatgatgaatatcgcttgtacagtccgctggtcaaaccagaccaaaacattcagttctggctcgaacagtttccgcaagcgtgggctgaaactgctggcatgggcctggccaaacaggttcctcctcaggtaatccaattaaaggcatctgccacgccggtgtcagttcgtcagtatccgctgtcgaaagaagcgcaagaggggattcgcccacacattcagcgtttgatccagcagggcattctggtaccggttcaaagcccctggaataccccgcttttaccagtccgtaaaccgggtacaaacgattaccgtcctgtgcaagacctgcgcgaagtcaataaacgtgtgcaggatatccacccaaccgttccgaacccgtataatctgttgtgcgcgttaccgccgcagcgttcctggtacacggtgctggacctgaaggacgcgttcttctgtcttcgcctccatcccaccagccagccactgtttgcctttgaatggcgcgatcctgatacgggccgtactgggcaattaacatggacccgtttgccgcagggctttaagaacagtcccaccatttttgatgaggctcttcgtcgcgacctcgcaaatttccgcatccaacacccacaggtaacgttactccagtatgtcgatgatcttttgttagcgggtgccaccaaacaggactgcttggaaggaacgaaagcacttctcttggaactctcggatttaggttatcgtgtgtccgccaagaaagctcagatttgtcgccgcgaagtgacatacttaggctattcattgcgtgatggtcaacgttggcttactgaggcgcgcaagaagaccgttgttcaaatccccgcccctacgaccccgaaacagatgcgtgaatttcttggcacggcaggtttctgccgtttgtggattcctggctttgctacgttagcggcacccctctatccactcacgaaagagaaaggagaattctcttgggccccagaacatcagaaagcgtttgacgccatcaagaaagcgttattaagcgctcctgctcttgcattgcccgatgtcaccaaaccattcacgctctacgtggatgaacgcaaaggcgtagcccgcggtgtgttgacacagaccttaggaccttggcgtcgtcccgtggcctacctctcgaagaaacttgacccagttgcaagtggttggcctgtctgcttgaaagctattgccgcagttgcaatcctcgtcaaagatgccgacaaacttactttgggccagaacattactgttattgcaccacacgcccttgaaaacatcgttcgtcagccacctgatcgctggatgaccaatgctcgcatgacgcattatcagagcctcttgcttaccgaacgcgtgacttttgctccacctgcagccttaaaccccgcaacccttttacccgaagaaacagatgagcctgtgacgcatgactgtcaccagctcttgattgaagaaactggcgtacgcaaagacctcaccgatattccattaacaggtgaggtacttacgtggtttaccggcgggtcctcttatgtcgtcgaaggcaaacgtatggctggtgccgccgttgttgatggcacccgtactatctgggcaagcagcttacccgaaggcacgagtgctcagaaagcagatttgatggccttgacccaagccttacgccttgctgaagggaaatcgatcaatatttacaccgactcacgctatgcattcgccacggcacatgtacacggtgccatctacaaacaacgtggtttgttaacttctgctggccgcgagattaagaacaaagaagaaatcctttccttacttgaagccttacacctccccaaacgtctcgctattattcattgtccagggcatcagaaagcaaaagatcctatcagccgtgggaatcaaatggcagatcgtgtcgctaaacaggcagcccaaggcgttaacttgttgcccatgattgagacccctaaagctcca

SEQ ID NO: 128 - protein, 687 aa, synthetic construct
  REGION 1..687: note = Engineered reverse transcriptase variants
MHHHHHHGGSGVLTLQLDDEYRLYSPLVKPDQNIQFWLEQFPQAWAETAGMGLAKQVPPQVIQLKASATPVSVRQYPLSKEAQEGIRPHIQRLIQQGILVPVQSPWNTPLLPVRKPGTNDYRPVQDLREVNKRVQDIHPTVPNPYNLLCALPPQRSWYTVLDLKDAFFCLRLHPTSQPLFAFEWRDPDTGRTGQLTWTRLPQGFKNSPTIFDEALRRDLANFRIQHPQVTLLQYVDDLLLAGATKQDCLEGTKALLLELSDLGYRVSAKKAQICRREVTYLGYSLRDGQRWLTEARKKTVVQIPAPTTPKQMREFLGTAGFCRLWIPGFATLAAPLYPLTKEKGEFSWAPEHQKAFDAIKKALLSAPALALPDVTKPFTLYVDERKGVARGVLTQTLGPWRRPVAYLSKKLDPVASGWPVCLKAIAAVAILVKDADKLTLGQNITVIAPHALENIVRQPPDRWMTNARMTHYQSLLLTERVTFAPPAALNPATLLPEETDEPVTHDCHQLLIEETGVRKDLTDIPLTGEVLTWFTGGSSYVVEGKRMAGAAVVDGTRTIWASSLPEGTSAQKADLMALTQALRLAEGKSINIYTDSRYAFATAHVHGAIYKQRGLLTSAGREIKNKEEILSLLEALHLPKRLAIIHCPGHQKAKDPISRGNQMADRVAKQAAQGVNLLPMIETPKAP

SEQ ID NO: 129 - DNA, 2061 bp, synthetic construct
  misc_feature 1..2061: note = Engineered reverse transcriptase variants
  source 1..2061: mol_type = other DNA
atgcatcaccatcaccatcatggtggtagcggagtgctgacccttcagctggatgatgaatatcgcttgtacagtccgctggtcaaaccagaccaaaacattcagttctggctcgaacagtttccgcaagcgtgggctgaaactgctggcatgggcctggccaaacaggttcctcctcaggtaatccaattaaaggcatctgccacgccggtgtcagttcgtcagtatccgctgtcgaaagaagcgcaagaggggattcgcccacacgtgcagcgtttgatccagcagggcattctggtaccggttcaaagcccctggaataccccgcttttaccagtccgcaaaccgggtacaaacgattaccgtcctgtgcaagacctgcgcgaagtcaataaacgtgtgcaggatatccacccaaccgttccgaacccgtataatctgttgtgcgcgttaccgccgcagcgttcctggtacacggtgctggacctgaaggacgcgttcttctgtcttcgtctccaccccaccagccagccactgtttgcctttgaatggcgcgatcctgatacgggccgtactgggcaattaacatggacccgtttgccgcagggctttaagaacagtcccaccatttttgatgaggctcttcaccgcgacctcgcaaatttccgcatccaacacccacaggtaacgttactccagtatgtcgatgatcttttgttagcgggtgccaccaaacaggactgcttggaaggaacgaaagcacttctcttggaactctcggatttaggttatcgtgtgtccgccaagaaagctcagatttgtcgccgcgaagtgacatacttaggctattcattgcgtgatggtcaacgttggcttactgaggcgcgcaagaagaccgttgttcaaatccccgcccctaccaccgcgaagcagatgcgtgaatttcttggcacggcaggtttctgccgtttgtggattcctggctttgctaccttagcggcacccctctatccactcacgaaagagaaaggagaattctcttgggccccagaacatcagaaagcgtttgacgccatcaagaaagcgttattaagcgctcctgctcttgcattgcccgatgtcaccaaaccattcacgctctacgtggatgaacgcaaaggcgtagcccgcggtgtgttgacacagaccttaggaccttggcgtcgtcccgtggcctacctctcgaagaaacttgacccagttgcaagtggttggcctgtctgcttgaaagctattgccgcagttgcaatcctcgtcaaagatgccgacaaacttactttgggccagaacctgactgttattgcaccacacgcccttgaaaacatcgttcgtcagccacctgatcgctggatgaccaatgctcgcatgacgcattatcagagcctcttgcttaccgaacgcgtgacttttgctccacctgcagccttaaaccccgcaacccttttacccgaagaaacagatgagcctgtgacgcatgactgtcaccagctcttgattgaagaaactggcgtacgcaaagacctcaccgatattccattaacaggtgaggtacttacgtggtttaccgatgggtcctcttatgtcgtcgaaggcaaacgtatggctggtgccgccgttgttgatggcacccgtactatctgggcaagcagcttacccgaaggcacgagtgctcagaaagcagagttgatggccttgacccaagccttacgccttgctgaagggaaatcgatcaatatttacaccgactcacgctatgcattcgccacggcacatgtacacggtgccatctacaaacaacgtggtttgttaacttctgctggccgcgagattaagaacaaagaagaaatcctttccttacttgaagccttacacctccccaaacgtctcgctattattcattgtccagggcatcagaaagcaaaagatcctatcagccgtgggaatcagatggcagatcgtgtcgctaaacaggcagcccaaggcgttaacttgttgcccatgattgagacccctaaagctcca

SEQ ID NO: 130 - protein, 687 aa, synthetic construct
  REGION 1..687: note = Engineered reverse transcriptase variants
MHHHHHHGGSGVLTLQLDDEYRLYSPLVKPDQNIQFWLEQFPQAWAETAGMGLAKQVPPQVIQLKASATPVSVRQYPLSKEAQEGIRPHVQRLIQQGILVPVQSPWNTPLLPVRKPGTNDYRPVQDLREVNKRVQDIHPTVPNPYNLLCALPPQRSWYTVLDLKDAFFCLRLHPTSQPLFAFEWRDPDTGRTGQLTWTRLPQGFKNSPTIFDEALHRDLANFRIQHPQVTLLQYVDDLLLAGATKQDCLEGTKALLLELSDLGYRVSAKKAQICRREVTYLGYSLRDGQRWLTEARKKTVVQIPAPTTAKQMREFLGTAGFCRLWIPGFATLAAPLYPLTKEKGEFSWAPEHQKAFDAIKKALLSAPALALPDVTKPFTLYVDERKGVARGVLTQTLGPWRRPVAYLSKKLDPVASGWPVCLKAIAAVAILVKDADKLTLGQNLTVIAPHALENIVRQPPDRWMTNARMTHYQSLLLTERVTFAPPAALNPATLLPEETDEPVTHDCHQLLIEETGVRKDLTDIPLTGEVLTWFTDGSSYVVEGKRMAGAAVVDGTRTIWASSLPEGTSAQKAELMALTQALRLAEGKSINIYTDSRYAFATAHVHGAIYKQRGLLTSAGREIKNKEEILSLLEALHLPKRLAIIHCPGHQKAKDPISRGNQMADRVAKQAAQGVNLLPMIETPKAP

SEQ ID NO: 131 - DNA, 2061 bp, synthetic construct
  misc_feature 1..2061: note = Engineered reverse transcriptase variants
  source 1..2061: mol_type = other DNA
atgcatcaccatcaccatcatggtggtagcggagtgctgacccttcagctggatgatgaatatcgcttgtacagtccgctggtcaaaccagaccaaaacattcagttctggctcgaacagtttccgcaagcgtgggctgaaactgcaggcatgggcctggccaaacaggttcctcctcaggtaatccaattaaaggcatctgccacgccggtgtcagttcgtcagtatccgctgtcgaaagaagcgcaagaggggattcgcccacacattcagcgtttgatccagcagggcattctggtaccggttcaaagcccctggaataccccgcttttaccagtccgcaaaccgggtacaaacgattaccgtcctgtgcaagacctgcgcgaagtcaataaacgtgtgcaggatatccacccaaccgttccgaacccgtataatctgttgtgcgcgttaccgccgcagcgttcctggtacacggtgctggacctgaaggacgcgttcttctgtcttcgcctccatcccaccagccagccactgtttgcctttgaatggcgcgatcctgatacgggccgtactgggcaattaacatggacccgtttgccgcagggctttaagaacagtcccaccatttttgatgaggctcttcaccgcgacctcgcaaatttccgcatccaacacccacaggtaacgttactccagtatgtcgatgatcttttgttagcgggtgccaccaaacaggactgcttggaaggaacgaaagcacttctcttggaactctcggatttaggttatcgtgtgtccgccaagaaagctcagatttgtcgccgcgaagtgacatacttaggctattcattgcgtgatggtcaacgttggcttactgaggcgcgcaagaagaccgttgttcaaatccccgcccctacgaccgcgaaacagatgcgtgaatttcttggcacggcaggtgcgtgccgtttgtggattcctggctttgctaccttagcggcacccctctatccactcacgaaagagaaaggagaattctcttggggtccagaacatcagaaagcgtttgacgccatcaagaaagcgttattaagcgctcctgctcttgcattgcccgatgtcaccaaaccattcacgctctacgtggatgaacgcaaaggcgtagcccgcggtgtgttgacacagaccttaggaccttggcgtcgtcccgtggcctacctctcgaagaaacttgacccagttgcaagtggttggcctgtctgcttgaaagctattgccgcagttgcaatcctcgtcaaagatgccgacaaacttactttgggccagaacattactgttattgcaccacacgcccttgaaaacatcgttcgtcagccacctgatcgctggatgaccaatgctcgcatgacgcattatcagagcctcttgcttaccgaacgcgtgacttttgctccacctgcagccttaaaccccgcaacccttttacccgaagaaacagatgagcctgtgacgcatgactgtcaccagctcttgattgaagaaactggcgtacgcaaagacctcaccgatattccattaacaggtgaggtacttacgtggtttaccggcgggtcctcttatgtcgtcgaaggcaaacgtatggctggtgccgccgttgttgatggcacccgtactatctgggcaagcagcttacccgaaggcacgagtgctcagaaagcagagttgatggccttgacccaagccttacgccttgctgaagggaaatcgatcaatatttacaccgactcacgcagcgcattcgccacggcacatgtacacggtgccatctacaaacaacgtggtttgttaacttctgctggccgcgagattaagaacaaagaagaaatcctttccttacttgaagccttacacctccccaaacgtctcgctattattcattgtccagggggtcagaaagcaaaagatcctatcagccgtgggaatcaaatggcagatcgtgtcgctaaacaggcagcccaaggcgttaacttgttgcccatgattgagacccctaaagctcca

SEQ ID NO: 132 - protein, 687 aa, synthetic construct
  REGION 1..687: note = Engineered reverse transcriptase variants
MHHHHHHGGSGVLTLQLDDEYRLYSPLVKPDQNIQFWLEQFPQAWAETAGMGLAKQVPPQVIQLKASATPVSVRQYPLSKEAQEGIRPHIQRLIQQGILVPVQSPWNTPLLPVRKPGTNDYRPVQDLREVNKRVQDIHPTVPNPYNLLCALPPQRSWYTVLDLKDAFFCLRLHPTSQPLFAFEWRDPDTGRTGQLTWTRLPQGFKNSPTIFDEALHRDLANFRIQHPQVTLLQYVDDLLLAGATKQDCLEGTKALLLELSDLGYRVSAKKAQICRREVTYLGYSLRDGQRWLTEARKKTVVQIPAPTTAKQMREFLGTAGACRLWIPGFATLAAPLYPLTKEKGEFSWGPEHQKAFDAIKKALLSAPALALPDVTKPFTLYVDERKGVARGVLTQTLGPWRRPVAYLSKKLDPVASGWPVCLKAIAAVAILVKDADKLTLGQNITVIAPHALENIVRQPPDRWMTNARMTHYQSLLLTERVTFAPPAALNPATLLPEETDEPVTHDCHQLLIEETGVRKDLTDIPLTGEVLTWFTGGSSYVVEGKRMAGAAVVDGTRTIWASSLPEGTSAQKAELMALTQALRLAEGKSINIYTDSRSAFATAHVHGAIYKQRGLLTSAGREIKNKEEILSLLEALHLPKRLAIIHCPGGQKAKDPISRGNQMADRVAKQAAQGVNLLPMIETPKAP

SEQ ID NO: 133 - DNA, 2061 bp, synthetic construct
  misc_feature 1..2061: note = Engineered reverse transcriptase variants
  source 1..2061: mol_type = other DNA
atgcatcaccatcaccatcatggtggtagcggagtgctgacccttcagctggatgatgaatatcgcttgtacagtccgctggtcaaaccagaccaaaacattcagttctggctcgaacagtttccgcaagcgtgggctgaaactggtggcatgggcctggccaaacaggttcctcctcaggtaatccagttaaaggcatctgccacgccggtgtcagttcgtcagtatccgctgtcgaaagaagcgcaagaggggattcgcccacacgttcagcgtttgatccagcagggcattctggtaccggttcaaagcccctggaataccccgcttttaccagtccgtaaaccgggtacaaacgattaccgtcctgtgcaagacctgcgcgaagtcaataaacgtgtgcaggatatccacccaaccgttccgaacccgtataatctgttgtgcgcgttaccgccgcagcgttcctggtacacggtgctggacccgaaggacgcgttcttctgtcttcgcctccatcccaccagccagccactgtttgcctttgaatggcgcgatcctgatacgggccgtactgggcaattaacatggacccgtttgccgcagggctttaagaacagtcccaccatttttgatgaggctcttcaccgcgacctcgcaaatttccgcatccaacacccacaggtaacgttactccagtatgtcgatgatcttttgttagcgggtgccaccaaacaggactgcttggaaggaacgaaagcacttctcttggaactctcggatttaggttatcgtgtgtccgccaagaaagctcagatttgtcgccgcgaagtgacatacttaggctattcattgcgtgatggtcaacgttggcttactgaggcgcgcaagaagaccgttgttcaaatccccgcccctacgaccccgaaacagatgcgtgaatttcttggcacggcaggtgcgtgccgtttgtggattcctggctttgctaccttagcggcacccctctatccactcacgaaagagaaaggagaattctcttgggctccagaacatcagaaagcgtttgacgccatcaagaaagcgttattaagcgctcctgctcttgcattgcccgatgtcaccaaaccattcacgctctacgtggatgaacgcaaaggcgtagcccgcggtgtgttgacacagaccttaggaccttggcgtcgtcccgtggcctacctctcgaagaaacttgacccagttgcaagtggttggcctgtctgcttgaaagctattgccgcagttgcaatcctcgtcaaagatgccgacaaacttactttgggccagaacattactgttattgcaccacacgcccttgaaaacatcgttcgtcagccacctgatcgctggatgaccaatgctcgcatgacgcattatcagagcctcttgcttaccgaacgcgtgacttttgctccacctgcagccttaaaccccgcaacccttttacccgaagaaacagatgagcctgtgacgcatgactgtcaccagctcttgattgaagaaactggcgtacgcaaagacctcaccgatattccattaacaggtgaggtacttacgtggtttaccgaggggtcctcttatgtcgtcgaaggcaaacgtatggctggtgccgccgttgttgatggcacccgtactatctgggcaagcagcttacccgaaggcacgagtgctcagaaagcagatttgatggccttgacccaagccttacgccttgctgaagggaaatcgatcaatatttacaccgactcacgctatgcattcgccacggcacatgtacacggtgccatctacaaacaacgtggtttgttaacttctgctggccgcgagattaagaacaaagaagaaatcctttccttacttgaagccttacacctccccaaacgtctcgctattattcattgtccagggggtcagaaagcaaaagatcctatcagccgtgggaatcaaatggcagatcgtgtcgctaaacaggcagcccaaggcgttaacttgttgcccatgattgagacccctaaagctcca

SEQ ID NO: 134 - protein, 687 aa, synthetic construct
  REGION 1..687: note = Engineered reverse transcriptase variants
MHHHHHHGGSGVLTLQLDDEYRLYSPLVKPDQNIQFWLEQFPQAWAETGGMGLAKQVPPQVIQLKASATPVSVRQYPLSKEAQEGIRPHVQRLIQQGILVPVQSPWNTPLLPVRKPGTNDYRPVQDLREVNKRVQDIHPTVPNPYNLLCALPPQRSWYTVLDPKDAFFCLRLHPTSQPLFAFEWRDPDTGRTGQLTWTRLPQGFKNSPTIFDEALHRDLANFRIQHPQVTLLQYVDDLLLAGATKQDCLEGTKALLLELSDLGYRVSAKKAQICRREVTYLGYSLRDGQRWLTEARKKTVVQIPAPTTPKQMREFLGTAGACRLWIPGFATLAAPLYPLTKEKGEFSWAPEHQKAFDAIKKALLSAPALALPDVTKPFTLYVDERKGVARGVLTQTLGPWRRPVAYLSKKLDPVASGWPVCLKAIAAVAILVKDADKLTLGQNITVIAPHALENIVRQPPDRWMTNARMTHYQSLLLTERVTFAPPAALNPATLLPEETDEPVTHDCHQLLIEETGVRKDLTDIPLTGEVLTWFTEGSSYVVEGKRMAGAAVVDGTRTIWASSLPEGTSAQKADLMALTQALRLAEGKSINIYTDSRYAFATAHVHGAIYKQRGLLTSAGREIKNKEEILSLLEALHLPKRLAIIHCPGGQKAKDPISRGNQMADRVAKQAAQGVNLLPMIETPKAP

SEQ ID NO: 135 - DNA, 2061 bp, synthetic construct
  misc_feature 1..2061: note = Engineered reverse transcriptase variants
  source 1..2061: mol_type = other DNA
atgcatcaccatcaccatcatggtggtagcggagtgctgacccttcagctggatgatgaatatcgcttgtacagtccgctggtcaaaccagaccaaaacattcagttctggctcgaacagtttccgcaagcgtgggctgaaactggtggcatgggcctggccaaacaggttcctcctcaggtaatcctgttaaaggcatctgccacgccggtgtcagttcgtcagtatccgctgtcgaaagaagcgcaagaggggattcgcccacacattcagcgtttgatccagcagggcattctggtaccggttcaaagcccctggaataccccgcttttaccagtccgcaaaccgggtacaaacgattaccgtcctgtgcaagacctgcgcgaagtcaataaacgtgtgcaggatatccacccaaccgttccgaacccgtataatctgttgtgcgcgttaccgccgcagcgttcctggtacacggtgctggacctgaaggacgcgttcttctgtcttcgcctcgcacccaccagccagccactgtttgcctttgaatggcgcgatcctgatacgggccgtactggacaattaacatggacccgtttgccgcagggctttaagaacagtcccaccatttttgatgaggctcttcaccgcgacctcgcaaatttccgcatccaacacccacaggtaacgttactccagtatgtcgatgatcttttgttagcgggtgccaccaaacaggactgcttggaaggaacgaaagcacttctcttggaactctcggatttaggttatcgtgtgtccgccaagaaagctcagatttgtcgccgcgaagtgacatacttaggctattcattgcgtgatggtcaacgttggcttactgaggcgcgcaagaagaccgttgttcaaatccccgcccctaagaccgcgaaacagatgcgtgaatttcttggcacggcaggtttctgccgtttgtggattcctggctttgctgaattagcggcacccctctatccactcacgaaagagaaaggagaattctcttgggctccagaacatcagaaagcgtttgacgccatcaagaaagcgttattaagcgctcctgctcttgcattgcccgatgtcaccaaaccattcacgctctacgtggatgaacgcaaaggcgtagcccgcggtgtgttgacacagaccttaggaccttggcgtcgtcccgtggcctacctctcgaagaaacttgacccagttgcaagtggttggcctgtctgcttgaaagctattgccgcagttgcaatcctcgtcaaagatgccgacaaacttactttgggccagaacattactgttattgcaccacacgcccttgaaaacatcgttcgtcagccacctgatcgctggatgaccaatgctcgcatgacgcattatcagagcctcttgcttaccgaacgcgtgacttttgctccacctgcagccttaaaccccgcaacccttttacccgaagaaacagatgagcctgtgacgcatgactgtcaccagctcttgattgaagaaactggcgtacgcaaagacctcaccgatattccattaacaggtgaggtacttacgtggtttaccgaggggtcctcttatgtcgtcgaaggcaaacgtatggctggtgccgccgttgttgatggcacccgtactatctgggcaagcagcttacccgaaggcacgagtgctcagaaagcagagttgatggccttgacccaagccttacgccttgctgaagggaaatcgatcaatatttacaccgactcacgcagcgcattcgccacggcacatgtacacggtgccatctacaaacaacgtggtttgttaacttctgctggccgcgagattaagaacaaagaagaaatcctttccttacttgaagccttacacctccccaaacgtctcgctattattcattgtccagggggtcagaaagcaaaagatcctatcagccgtgggaatcaaatggcagatcgtgtcgctaaacaggcagcccaaggcgttaacttgttgcccatgattgagacccctaaagctcca

SEQ ID NO: 136 - protein, 687 aa, synthetic construct
  REGION 1..687: note = Engineered reverse transcriptase variants
MHHHHHHGGSGVLTLQLDDEYRLYSPLVKPDQNIQFWLEQFPQAWAETGGMGLAKQVPPQVILLKASATPVSVRQYPLSKEAQEGIRPHIQRLIQQGILVPVQSPWNTPLLPVRKPGTNDYRPVQDLREVNKRVQDIHPTVPNPYNLLCALPPQRSWYTVLDLKDAFFCLRLAPTSQPLFAFEWRDPDTGRTGQLTWTRLPQGFKNSPTIFDEALHRDLANFRIQHPQVTLLQYVDDLLLAGATKQDCLEGTKALLLELSDLGYRVSAKKAQICRREVTYLGYSLRDGQRWLTEARKKTVVQIPAPKTAKQMREFLGTAGFCRLWIPGFAELAAPLYPLTKEKGEFSWAPEHQKAFDAIKKALLSAPALALPDVTKPFTLYVDERKGVARGVLTQTLGPWRRPVAYLSKKLDPVASGWPVCLKAIAAVAILVKDADKLTLGQNITVIAPHALENIVRQPPDRWMTNARMTHYQSLLLTERVTFAPPAALNPATLLPEETDEPVTHDCHQLLIEETGVRKDLTDIPLTGEVLTWFTEGSSYVVEGKRMAGAAVVDGTRTIWASSLPEGTSAQKAELMALTQALRLAEGKSINIYTDSRSAFATAHVHGAIYKQRGLLTSAGREIKNKEEILSLLEALHLPKRLAIIHCPGGQKAKDPISRGNQMADRVAKQAAQGVNLLPMIETPKAP

SEQ ID NO: 137 - DNA, 2061 bp, synthetic construct
  misc_feature 1..2061: note = Engineered reverse transcriptase variants
  source 1..2061: mol_type = other DNA
atgcatcaccatcaccatcatggtggtagcggagtgctgacccttcagctggatgatgaatatcgcttgtacagtccgctggtcaaaccagaccaaaacattcagttctggctcgaacagtttccgcaagcgtgggctgaaactgcaggcatgggcctggccaaacaggttcctcctcaggtaatccagttaaaggcatcttcgacgccggtgtcagttcgtcagtatccgctgtcgaaaaaggcgcaagaggggattcgcccacacgtgcagcgtttgatccagcagggcattctggtaccggttcaaagcccctggaataccccgcttttaccagtccgcaaaccgggtacaaacgattaccgtcctgtgcaagacctgcgcgaagtcaataaacgtgtgcaggatatccacccaaccgttccgaacccgtataatctgttgtgcgcgttaccgccgcagcgttcctggtacacggtgctggacctgaaggacgcgtacttctgtcttcgcctccaccccaccagccagccactgtttgcctttgaatggcgcgatcctgatacgggccgtactgggcaattaacatggacccgtttgccgcagggctttaagaacagtcccaccatttttgatgaggctcttcaccgcgacctcgcaaatttccgcatccaacacccacaggtaacgttactccagtatgtcgatgatcttttgttagcgggtgccaccaaacaggactgcttggaaggaacgaaagcacttctcttgaccctctcggacttaggttatcgtgtgtccgccaagaaagctcagatttgtcgccgcgaagtgacatacttaggctattcattgcgtgatggtcaacgttggcttactgaggcgcgcaagaagaccgttgttcaaatccccgcccctaccaccgcgaaacagatgcgtgaatttcttggcacggcaggtttctgccgtttgtggattcctggctttgctaccttagcggcacccctctatccactcacgaaagagaaaggagaattctcttgggccccagaacatcagaaagcgtttgacgccatcaagaaagcgttattaagcgctcctgctcttgcattgcccgatgtcaccaaaccattcacgctctacgtggatgaacgcaaaggcgtagcccgcggtgtgttgacacagaccttaggaccttggcgtcgtcccgtggcctacctctcgaagaaacttgacccagttgcaagtggttggcctgtctgcttgaaagctattgccgcagttgcaatcctcgtcaaagatgccgacaaacttactttgggccagaacattactgttggcgcaccacacgcccttgaaaacatcgttcgtcagccacctgatcgctggatgaccaaagctcgcatgacgcattatcagagcctcttgcttaccgaacgcgtgacttttgctccacctgcagccttaaaccccgcaacccttttacccgaagaaacagatgagcctgtgacgcatgactgtcaccagctcttgattgaagaaactggcgtacgcaaagacctcaccgatattccattaacaggtgaggtacttacgtggtttaccaacgggtcctcttatgtcgtcgaaggcaaacgtatggctggtgccgccgttgttgatggcacccgtactatctgggcaagcagcttacccgaaggcacgagtgctcagaaagcagagttgatggccttgacccaagccttacgccttgctgaagggaaatcgatcaatatttacaccgactcacgctatgcattcgccacggcacatgtacacggtgccatctacaaacaacgtggtttgttaacttctgctggccgcgagattaagaacaaagaagaaatcctttccttacttgaagccttacacctccccaaacgtctcgctattattcattgtccagggcatcagaaagcaaaagatcctatcagccgtgggaatcaaatggcagatcgtgtcgctaaacaggcagcccaaggcgttaacttgttgcccatgattgagacccctaaagctcca

SEQ ID NO: 138 - protein, 687 aa, synthetic construct
  REGION 1..687: note = Engineered reverse transcriptase variants
MHHHHHHGGSGVLTLQLDDEYRLYSPLVKPDQNIQFWLEQFPQAWAETAGMGLAKQVPPQVIQLKASSTPVSVRQYPLSKKAQEGIRPHVQRLIQQGILVPVQSPWNTPLLPVRKPGTNDYRPVQDLREVNKRVQDIHPTVPNPYNLLCALPPQRSWYTVLDLKDAYFCLRLHPTSQPLFAFEWRDPDTGRTGQLTWTRLPQGFKNSPTIFDEALHRDLANFRIQHPQVTLLQYVDDLLLAGATKQDCLEGTKALLLTLSDLGYRVSAKKAQICRREVTYLGYSLRDGQRWLTEARKKTVVQIPAPTTAKQMREFLGTAGFCRLWIPGFATLAAPLYPLTKEKGEFSWAPEHQKAFDAIKKALLSAPALALPDVTKPFTLYVDERKGVARGVLTQTLGPWRRPVAYLSKKLDPVASGWPVCLKAIAAVAILVKDADKLTLGQNITVGAPHALENIVRQPPDRWMTKARMTHYQSLLLTERVTFAPPAALNPATLLPEETDEPVTHDCHQLLIEETGVRKDLTDIPLTGEVLTWFTNGSSYVVEGKRMAGAAVVDGTRTIWASSLPEGTSAQKAELMALTQALRLAEGKSINIYTDSRYAFATAHVHGAIYKQRGLLTSAGREIKNKEEILSLLEALHLPKRLAIIHCPGHQKAKDPISRGNQMADRVAKQAAQGVNLLPMIETPKAP

SEQ ID NO: 139 - DNA, 2061 bp, synthetic construct
  misc_feature 1..2061: note = Engineered reverse transcriptase variants
  source 1..2061: mol_type = other DNA
atgcatcaccatcaccatcatggtggtagcggagtgctgacccttcagctggatgatgaatatcgcttgtacagtccgctggtcaaaccagaccaaaacattcagttctggctcgaacagtttccgcaagcgtgggctgaaactgctggcatgggcctggccaaacaggttcctcctcaggtaatccagttaaaggcatctgccacgccggtgtcagttcgtcagtatccgctgtcgaaagaagcgcaagaggggattcgcccacacattcagcgtttgatccagcagggcattctggtaccggttcaaagcccctggaataccccgcttttaccagtccgtaaaccgggtacaaacgattaccgtcctgtgcaagacctgcgcgaagtcaataaacgtgtgcaggatatccacccaaccgttccgaacccgtataatctgttgtgcgcgttaccgccgcagcgttcctggtacacggtgctggacctgaaggacgcgttcttctgtcttcgcctccatcccaccagccagccactgtttgcctttgaatggcgcgatcctgatacgggccgtactgggcaattaacatggacccgtttgccgcagggctttaagaacagtcccaccatttttgatgaggctcttcatcgcgacctcgcaaatttccgcatccaacacccacaggtaacgttactccagtatgtcgatgatcttttgttagcgggtgccaccaaacaggactgcttggaaggaacgaaagcacttctcttggaactctcggatttaggttatcgtgtgtccgccaagaaagctcagatttgtcgccgcgaagtgacatacttaggctattcattgcgtgatggtcaacgttggcttactgaggcgcgcaagaagaccgttgttcaaatccccgcccctacgaccgcgaaacagatgcgtgaatttcttggcacggcaggtttttgccgtttgtggattcctggctttgctgaattagcggcacccctctatccactcacgaaagagaaaggagaattctcttgggccccagaacatcagaaagcgtttgacgccatcaagaaagcgttattaagcgctcctgctcttgcattgcccgatgtcaccaaaccattcacgctctacgtggatgaacgcaaaggcgtagcccgcggtgtgttgacacagaccttaggaccttggcgtcgtcccgtggcctacctctcgaagaaacttgacccagttgcaagtggttggcctgtctgcttgaaagctattgccgcagttgcaatcctcgtcaaagatgccgacaaacttactttgggccagaacattactgttattgcaccacacgcccttgaaaacatcgttcgtcagccacctgatcgctggatgaccaatgctcgcatgacgcattatcagagcctcttgcttaccgaacgcgtgacttttgctccacctgcagccttaaaccccgcaacccttttacccgaagaaacagatgagcctgtgacgcatgactgtcaccagctcttgattgaagaaactggcgtacgcaaagacctcaccgatattccattaacaggtgaggtacttacgtggtttaccgacgggtcctcttatgtcgtcgaaggcaaacgtatggctggtgccgccgttgttgatggcacccgtactatctgggcaagcagcttacccgaaggcacgagtgctcagaaagcagatttgatggccttgacccaagccttacgccttgctgaagggaaatcgatcaatatttacaccgactcacgctatgcattcgccacggcacatgtacacggtgccatctacaaacaacgtggtttgttaacttctgctggccgcgagattaagaacaaagaagaaatcctttccttacttgaagccttacacctccccaaacgtctcgctattattcattgtccagggcatcagaaagcaaaagatcctatcagccgtgggaatcaaatggcagatcgtgtcgctaaacaggcagcccaaggcgttaacttgttgcccatgattgagacccctaaagctcca

SEQ ID NO: 140 - protein, 687 aa, synthetic construct
  REGION 1..687: note = Engineered reverse transcriptase variants
MHHHHHHGGSGVLTLQLDDEYRLYSPLVKPDQNIQFWLEQFPQAWAETAGMGLAKQVPPQVIQLKASATPVSVRQYPLSKEAQEGIRPHIQRLIQQGILVPVQSPWNTPLLPVRKPGTNDYRPVQDLREVNKRVQDIHPTVPNPYNLLCALPPQRSWYTVLDLKDAFFCLRLHPTSQPLFAFEWRDPDTGRTGQLTWTRLPQGFKNSPTIFDEALHRDLANFRIQHPQVTLLQYVDDLLLAGATKQDCLEGTKALLLELSDLGYRVSAKKAQICRREVTYLGYSLRDGQRWLTEARKKTVVQIPAPTTAKQMREFLGTAGFCRLWIPGFAELAAPLYPLTKEKGEFSWAPEHQKAFDAIKKALLSAPALALPDVTKPFTLYVDERKGVARGVLTQTLGPWRRPVAYLSKKLDPVASGWPVCLKAIAAVAILVKDADKLTLGQNITVIAPHALENIVRQPPDRWMTNARMTHYQSLLLTERVTFAPPAALNPATLLPEETDEPVTHDCHQLLIEETGVRKDLTDIPLTGEVLTWFTDGSSYVVEGKRMAGAAVVDGTRTIWASSLPEGTSAQKADLMALTQALRLAEGKSINIYTDSRYAFATAHVHGAIYKQRGLLTSAGREIKNKEEILSLLEALHLPKRLAIIHCPGHQKAKDPISRGNQMADRVAKQAAQGVNLLPMIETPKAP

SEQ ID NO: 141 - DNA, 2061 bp, synthetic construct
  misc_feature 1..2061: note = Engineered reverse transcriptase variants
  source 1..2061: mol_type = other DNA
atgcatcaccatcaccatcatggtggtagcggagtgctgacccttcagctggatgatgaatatcgcttgtacagtccgctggtcaaaccagaccaaaacattcagttctggctcgaacagtttccgcaagcgtgggctgaaactggtggcatgggcctggccaaacaggttcctcctcaggtaatccaattaaaggcatctgccacgccggtgtcagttcgtcagtatccgctgtcgaaagaagcgcaagaggggattcgcccacacgttcagcgtttgatccagcagggcattctggtaccggttcaaagcccctggaataccccgcttttaccagtccgcaaaccgggtacaaacgattaccgtcctgtgcaagacctgcgcgaagtcaataaacgtgtgcaggatatccacccaaccgttccgaacccgtataatctgttgtgcgcgttaccgccgcagcgttcctggtacacggtgctggacctgaaggacgcgttcttctgtcttcgcctccatcccaccagccagccactgtttgcctttgaatggcgcgatcctgatacgggccgtactgggcaattaacatggacccgtttgccgcagggctttaagaacagtcccaccatttttgatgaggctcttcaccgcgacctcgcaaatttccgcatccaacacccacaggtaacgttactccagtatgtcgatgatcttttgttagcgggtgccaccaaacaggactgcttggaaggaacgaaagcacttctcttggaactctcggatttaggttatcgtgtgtccgccaagaaagctcagatttgtcgccgcgaagtgacatacttaggctattcattgcgtgatggtcaacgttggcttactgaggcgcgcaagaagaccgttgttcaaatccccgcccctaccaccgcgaaacagatgcgtgaatttcttggcacggcaggtgcgtgccgtttgtggattcctggctttgctacgttagcggcacccctctatccactcacgaaagagaaaggagaattctcttgggccccagaacatcagaaagcgtttgacgccatcaagaaagcgttattaagcgctcctgctcttgcattgcccgatgtcaccaaaccattcacgctctacgtggatgaacgcaaaggcgtagcccgcggtgtgttgacacagaccttaggaccttggcgtcgtcccgtggcctacctctcgaagaaacttgacccagttgcaagtggttggcctgtctgcttgaaagctattgccgcagttgcaatcctcgtcaaagatgccgacaaacttactttgggccagaacattactgttattgcaccacacgcccttgaaaacatcgttcgtcagccacctgatcgctggatgaccaatgctcgcatgacgcattatcagagcctcttgcttaccgaacgcgtgacttttgctccacctgcagccttaaaccccgcaacccttttacccgaagaaacagatgagcctgtgacgcatgactgtcaccagctcttgattgaagaaactggcgtacgcaaagacctcaccgatattccattaacaggtgaggtacttacgtggtttaccgatgggtcctcttatgtcgtcgaaggcaaacgtatggctggtgccgccgttgttgatggcacccgtactatctgggcaagcagcttacccgaaggcacgagtgctcagaaagcagagttgatggccttgacccaagccttacgccttgctgaagggaaatcgatcaatatttacaccgactcacgctatgcattcgccacggcacatgtacacggtgccatctacaaacaacgtggtttgttaacttctgctggccgcgagattaagaacaaagaagaaatcctttccttacttgaagccttacacctccccaaacgtctcgctattattcattgtccagggcatcagaaagcaaaagatcctatcagccgtgggaatcaaatggcagatcgtgtcgctaaacaggcagcccaaggcgttaacttgttgcccatgattgagacccctaaagctcca

SEQ ID NO: 142 - protein, 687 aa, synthetic construct
  REGION 1..687: note = Engineered reverse transcriptase variants
MHHHHHHGGSGVLTLQLDDEYRLYSPLVKPDQNIQFWLEQFPQAWAETGGMGLAKQVPPQVIQLKASATPVSVRQYPLSKEAQEGIRPHVQRLIQQGILVPVQSPWNTPLLPVRKPGTNDYRPVQDLREVNKRVQDIHPTVPNPYNLLCALPPQRSWYTVLDLKDAFFCLRLHPTSQPLFAFEWRDPDTGRTGQLTWTRLPQGFKNSPTIFDEALHRDLANFRIQHPQVTLLQYVDDLLLAGATKQDCLEGTKALLLELSDLGYRVSAKKAQICRREVTYLGYSLRDGQRWLTEARKKTVVQIPAPTTAKQMREFLGTAGACRLWIPGFATLAAPLYPLTKEKGEFSWAPEHQKAFDAIKKALLSAPALALPDVTKPFTLYVDERKGVARGVLTQTLGPWRRPVAYLSKKLDPVASGWPVCLKAIAAVAILVKDADKLTLGQNITVIAPHALENIVRQPPDRWMTNARMTHYQSLLLTERVTFAPPAALNPATLLPEETDEPVTHDCHQLLIEETGVRKDLTDIPLTGEVLTWFTDGSSYVVEGKRMAGAAVVDGTRTIWASSLPEGTSAQKAELMALTQALRLAEGKSINIYTDSRYAFATAHVHGAIYKQRGLLTSAGREIKNKEEILSLLEALHLPKRLAIIHCPGHQKAKDPISRGNQMADRVAKQAAQGVNLLPMIETPKAP

SEQ ID NO: 143 - DNA, 2061 bp, synthetic construct
  misc_feature 1..2061: note = Engineered reverse transcriptase variants
  source 1..2061: mol_type = other DNA
atgcatcaccatcaccatcatggtggtagcggagtgctgacccttcagctggatgatgaatatcgcttgtacagtccgctggtcaaaccagaccaaaacattcagttctggctcgaacagtttccgcaagcgtgggctgaaactgcaggcatgggcctggccaaacaggttcctcctcaggtaatccaattaaaggcatctgccacgccggtgtcagttcgtcagtatccgctgtcgaaagaagcgcaagaggggattcgcccacacgtgcagcgtttgctgcagcagggcattctggtaccggtccaaagcccctggaataccccgcttttaccagtccgcaaaccgggtacaaacgattaccgtcctgtgcaagacctgcgcgaagtcaataaacgtgtgcaggatatccacccaaccgttccgaacccgtataatctgttgtgcgcgttaccgccgcagcgttcctggtacacggtgctggacctgaaggacgcgttcttctgtcttcgcctccaccccaccagccagccactgtttgcctttgaatggcgcgatcctgatacgggccgtactgggcaattaacatggacccgtttgccgcagggctttaagaacagtcccaccatttttgatgaggctcttcaccgcgacctcgcaaatttccgcatccaacacccacaggtaacgttactccagtatgtcgatgatcttttgttagcgggtgccaccaaacaggactgcttggaaggaacgaaagcacttctcttggaactcagcgatttaggttatcgtgtgtccgccaagaaagctcagatttgtcgccgcgaagtgacatacttaggctattcattgcgtgatggtcaacgttggcttactgaggcgcgcaagaagaccgttgttcaaatccccgcccctaccaccgcgaaacagatgcgtgaatttcttggcacggcaggtttctgccgtttgtggattcctggctttgctaccttagcggcacccctctatccactcacgaaagagaaaggagaattctcttgggccccagaacatcagaaagcgtttgacgccatcaagaaagcgttattaagcgctcctgctcttgcgttgcccgatgtcaccaaaccattcacgctctacgtggatgaacgcaaaggcgtagcccgcggtgtgttgacacagaccttaggaccttggcgtcgtcccgtggcctacctctcgaagaaacttgacccagttgcaagtggttggcctgtctgcttgaaagctattgccgcagttgcaatcctcgtcaaagatgccgacaaacttactttgggccagaacattactgttattgcaccacacgcccttgaaaacatcgttcgtcagccacctgatcgctggatgacgaatgctcgcatgacgcattatcagagcctcttgcttaccgaacgcgtgacttttgctccacctgcagccttaaaccccgcaacccttttacccgaagaaacagatgagcctgtgacgcatgactgtcacgagctcttgattgaagaaactggcgtacgcaaagacctcaccgatattccattaacaggtgaggtacttacgtggtttaccgatgggtcctcttatgtcgtcgaaggcaaacgtatggctggtgccgccgttgttgatggcacccgtactatctgggcaagcagcttacccgaaggcacgagtgctcagaaagcagagttgatggccttgacccaagccttacgccttgctgaagggaaatcgatcaatatttacaccgactcacgctatgcattcgccacggcacatgtacacggtgccatctacaaacaacgtggtttgttaacttctgctggccgcgagattaagaacaaagaagaaatcctttccttacttgaagccttacacctccccaaacgtctcgctattattcattgtccagggcatcagaaagcaaaagatcctatcagccgtgggaatcaaatggcagatcgtgtcgctaaacaggcagcccaaggcgttaacttgttgcccatgattgagacccctaaagctcca

SEQ ID NO: 144 - protein, 687 aa, synthetic construct
  REGION 1..687: note = Engineered reverse transcriptase variants
MHHHHHHGGSGVLTLQLDDEYRLYSPLVKPDQNIQFWLEQFPQAWAETAGMGLAKQVPPQVIQLKASATPVSVRQYPLSKEAQEGIRPHVQRLLQQGILVPVQSPWNTPLLPVRKPGTNDYRPVQDLREVNKRVQDIHPTVPNPYNLLCALPPQRSWYTVLDLKDAFFCLRLHPTSQPLFAFEWRDPDTGRTGQLTWTRLPQGFKNSPTIFDEALHRDLANFRIQHPQVTLLQYVDDLLLAGATKQDCLEGTKALLLELSDLGYRVSAKKAQICRREVTYLGYSLRDGQRWLTEARKKTVVQIPAPTTAKQMREFLGTAGFCRLWIPGFATLAAPLYPLTKEKGEFSWAPEHQKAFDAIKKALLSAPALALPDVTKPFTLYVDERKGVARGVLTQTLGPWRRPVAYLSKKLDPVASGWPVCLKAIAAVAILVKDADKLTLGQNITVIAPHALENIVRQPPDRWMTNARMTHYQSLLLTERVTFAPPAALNPATLLPEETDEPVTHDCHELLIEETGVRKDLTDIPLTGEVLTWFTDGSSYVVEGKRMAGAAVVDGTRTIWASSLPEGTSAQKAELMALTQALRLAEGKSINIYTDSRYAFATAHVHGAIYKQRGLLTSAGREIKNKEEILSLLEALHLPKRLAIIHCPGHQKAKDPISRGNQMADRVAKQAAQGVNLLPMIETPKAP

SEQ ID NO: 145 - DNA, 2061 bp, synthetic construct
  misc_feature 1..2061: note = Engineered reverse transcriptase variants
  source 1..2061: mol_type = other DNA
atgcatcaccatcaccatcatggtggtagcggagtgctgacccttcagctggatgatgaatatcgcttgtacagtccgctggtcaaaccagaccaaaacattcagttctggctcgaacagtttccgcaagcgtgggctgaaactgctggcatgggcctggccaaacaggttcctcctcaggtaatccagttaaaggcatctgccacgccggtgtcagttcgtcagtatccgctgtcgaaagaagcgcaagaggggattcgcccacacattcagcgtttgatccagcagggcattctggtaccggttcaaagcccctggaataccccgcttttaccagtccgcaaaccgggtacaaacgattaccgtcctgtgcaagacctgcgcgaagtcaataaacgtgtgcaggatatccacccaaccgttccgaacccgtataatctgttgtgcgcgttaccgccgcagcgttcctggtacacggtgctggacctgaaggacgcgttcttctgtcttcgcctcgcacccaccagccagccactgtttgcctttgaatggcgcgatcctgatacgggccgtactgggcaattaacatggacccgtttgccgcagggctttaagaacagtcccaccatttttgatgaggctcttcaccgcgacctcgcaaatttccgcatccaacacccacaggtaacgttactccagtatgtcgatgatcttttgttagcgggtgccaccaaacaggactgcttggaaggaacgaaagcacttctcttggaactctcggatttaggttatcgtgtgtccgccaagaaagctcagatttgtcgccgcgaagtgacatacttaggctattcattgcgtgatggtcaacgttggcttactgaggcgcgcaagaagaccgttgttcaaatccccgcccctaccaccgcgaaacagatgcgtgaatttcttggcacggcaggtgcgtgccgtttgtggattcctggctttgctaccttagcggcacccctctatccactcacgaaagagaaaggagaattctcttgggccccagaacatcagaaagcgtttgacgccatcaagaaagcgttattaagcgctcctgctcttgcattgcccgatgtcaccaaaccattcacgctctacgtggatgaacgcaaaggcgtagcccgcggtgtgttgacacagaccttaggaccttggcgtcgtcccgtggcctacctctcgaagaaacttgacccagttgcaagtggttggcctgtctgcttgaaagctattgccgcagttgcaatcctcgtcaaagatgccgacaaacttactttgggccagaacattactgttattgcaccacacgcccttgaaaacatcgttcgtcagccacctgatcgctggatgaccaatgctcgcatgacgcattatcagagcctcttgcttaccgaacgcgtgacttttgctccacctgcagccttaaaccccgcaacccttttacccgaagaaacagatgagcctgtgacgcatgactgtcaccagctcttgattgaagaaactggcgtacgcaaagacctcaccgatattccattaacaggtgaggtacttacgtggtttaccgaggggtcctcttatgtcgtcgaaggcaaacgtatggctggtgccgccgttgttgatggcacccgtactatctgggcaagcagcttacccgaaggcacgagtgctcagaaagcagagttgatggccttgacccaagccttacgccttgctgaagggaaatcgatcaatatttacaccgactcacgctatgcattcgccacggcacatgtacacggtgccatctacaaacaacgtggtttgttaacttctgctggccgcgagattaagaacaaagaagaaatcctttccttacttgaagccttacacctccccaaacgtctcgctattattcattgtccagggcatcagaaagcaaaagatcctatcagccgtgggaatcaaatggcagatcgtgtcgctaaacaggcagcccaaggcgttaacttgttgcccatgattgagacccctaaagctcca

SEQ ID NO: 146 - protein, 687 aa, synthetic construct
  REGION 1..687: note = Engineered reverse transcriptase variants
MHHHHHHGGSGVLTLQLDDEYRLYSPLVKPDQNIQFWLEQFPQAWAETAGMGLAKQVPPQVIQLKASATPVSVRQYPLSKEAQEGIRPHIQRLIQQGILVPVQSPWNTPLLPVRKPGTNDYRPVQDLREVNKRVQDIHPTVPNPYNLLCALPPQRSWYTVLDLKDAFFCLRLAPTSQPLFAFEWRDPDTGRTGQLTWTRLPQGFKNSPTIFDEALHRDLANFRIQHPQVTLLQYVDDLLLAGATKQDCLEGTKALLLELSDLGYRVSAKKAQICRREVTYLGYSLRDGQRWLTEARKKTVVQIPAPTTAKQMREFLGTAGACRLWIPGFATLAAPLYPLTKEKGEFSWAPEHQKAFDAIKKALLSAPALALPDVTKPFTLYVDERKGVARGVLTQTLGPWRRPVAYLSKKLDPVASGWPVCLKAIAAVAILVKDADKLTLGQNITVIAPHALENIVRQPPDRWMTNARMTHYQSLLLTERVTFAPPAALNPATLLPEETDEPVTHDCHQLLIEETGVRKDLTDIPLTGEVLTWFTEGSSYVVEGKRMAGAAVVDGTRTIWASSLPEGTSAQKAELMALTQALRLAEGKSINIYTDSRYAFATAHVHGAIYKQRGLLTSAGREIKNKEEILSLLEALHLPKRLAIIHCPGHQKAKDPISRGNQMADRVAKQAAQGVNLLPMIETPKAP

SEQ ID NO: 147 - DNA, 2061 bp, synthetic construct
  misc_feature 1..2061: note = Engineered reverse transcriptase variants
  source 1..2061: mol_type = other DNA
atgcatcaccatcaccatcatggtggtagcggagtgctgacccttcagctggatgatgaatatcgcttgtacagtccgctggtcaaaccagaccaaaacattcagttctggctcgaacagtttccgcaagcgtgggctgaaactgcaggcatgggcctggccaaacaggttcctcctcaggtaatccaattaaaggcatctgccacgccggtgtcagttcgtcagtatccgctgtcgaaagaagcgcaagaggggattcgcccacacgtgcagcgtttgatccagcagggcattctggtaccggttcaaagcccctggaataccccgcttttaccagtccgcaaaccgggtacaaacgattaccgtcctgtgcaagacctgcgcgaagtcaataaacgtgtgcaggatatccacccaaccgttccgaacccgtataatctgttgtgcgcgttaccgccgcagcgttcctggtacacggtgctggacctgaaggacgcgtacttctgtcttcgcctccaccccaccagccagccactgtttgcctttgaatggcgcgatcctgatacgggccgtactgggcaattaacatggacccgtttgccgcagggctttaagaacagtcccaccatttttgatgaggctcttcaccgcgacctcgcaaatttccgcatccaacacccacaggtaacgttactccagtatgtcgatgatcttttgttagcgggtgccaccaaacaggactgcttggaaggaacgaaagcacttctcttggaactctcggacttaggttatcgtgtgtccgccaagaaagctcagatttgtcgccgcgaagtgacatacttaggctattcattgcgtgatggtcaacgttggcttactgaggcgcgcaagcgcaccgttgttcaaatccccgcccctaccaccgcgaaacagatgcgtgaatttcttggcacggcaggtttctgccgtttgtggattcctggctttgctaccttagcggcacccctctatccactcacgaaagagaaaggagaattctcttgggccccagaacatcagaaagcgtttgacgccatcaagaaagcgttattaagcgctcctgctcttgcattgcccgatgtcaccaaaccattcacgctctacgtggatgaacgcaaaggcgtagcccgcggtgtgttgacacagaccttaggaccttggcgtcgtcccgtggcctacctctcgaagaaacttgacccagttgcaagtggttggcctgtctgcttgaaagctattgccgcagttgcaatcctcgtcaaagatgccgacaaacttactttgggccagaacattactgttggcgcaccacacgcccttgaaaacatcgttcgtcagccacctgatcgctggatgaccaaagctcgcatgacgcattatcagagcctcttgcttaccgaacgcgtgacttttgctccacctgcagccttaaaccccgcaacccttttacccgaagaaacagatgagcctgtgacgcatgactgtcaccagctcttgattgaagaaactggcgtacgcaaagacctcaccgatattccattaacaggtgaggtacttacgtggtttaccgatgggtcctcttatgtcgtcgaaggcaaacgtatggctggtgccgccgttgttgatggcacccgtactatctgggcaagcagcttacccgaaggcacgagtgctcagaaagcagaattgatggccttgacccaagccttacgccttgctgaagggaaatcgatcaatatttacaccgactcacgctatgcattcgccacggcacatgtacacggtgccatctacaaacaacgtggtttgttaacttctgctggccgcgagattaagaacaaagaagaaatcctttccttacttgaagccttacacctccccaaacgtctcgctattattcattgtccagggcatcagaaagcaaaagatcctatcagccgtgggaatcaaatggcagatcgtgtcgctaaacaggcagcccaaggcgttaacttgttgcccatgattgagacccctaaagctcca

SEQ ID NO: 148 - protein, 687 aa, synthetic construct
  REGION 1..687: note = Engineered reverse transcriptase variants
MHHHHHHGGSGVLTLQLDDEYRLYSPLVKPDQNIQFWLEQFPQAWAETAGMGLAKQVPPQVIQLKASATPVSVRQYPLSKEAQEGIRPHVQRLIQQGILVPVQSPWNTPLLPVRKPGTNDYRPVQDLREVNKRVQDIHPTVPNPYNLLCALPPQRSWYTVLDLKDAYFCLRLHPTSQPLFAFEWRDPDTGRTGQLTWTRLPQGFKNSPTIFDEALHRDLANFRIQHPQVTLLQYVDDLLLAGATKQDCLEGTKALLLELSDLGYRVSAKKAQICRREVTYLGYSLRDGQRWLTEARKRTVVQIPAPTTAKQMREFLGTAGFCRLWIPGFATLAAPLYPLTKEKGEFSWAPEHQKAFDAIKKALLSAPALALPDVTKPFTLYVDERKGVARGVLTQTLGPWRRPVAYLSKKLDPVASGWPVCLKAIAAVAILVKDADKLTLGQNITVGAPHALENIVRQPPDRWMTKARMTHYQSLLLTERVTFAPPAALNPATLLPEETDEPVTHDCHQLLIEETGVRKDLTDIPLTGEVLTWFTDGSSYVVEGKRMAGAAVVDGTRTIWASSLPEGTSAQKAELMALTQALRLAEGKSINIYTDSRYAFATAHVHGAIYKQRGLLTSAGREIKNKEEILSLLEALHLPKRLAIIHCPGHQKAKDPISRGNQMADRVAKQAAQGVNLLPMIETPKAP

SEQ ID NO: 149 - DNA, 2061 bp, synthetic construct
  misc_feature 1..2061: note = Engineered reverse transcriptase variants
  source 1..2061: mol_type = other DNA
atgcatcaccatcaccatcatggtggtagcggagtgctgacccttcagctggatgatgaatatcgcttgtacagtccgctggtcaaaccagaccaaaacattcagttctggctcgaacagtttccgcaagcgtgggctgaaactgcaggcatgggcctggccaaacaggttcctcctcaggtaatccaattaaaggcatctgccacgccggtgtcagttcgtcagtatccgctgtcgaaagaagcgcaagaggggattcgcccacacgtgcagcgtttgatccagcagggcattctggtaccggttcaaagcccctggaataccccgcttttaccagtccgcaaaccgggtacaaacgattaccgtcctgtgcaagacctgcgcgaagtcaataaacgtgtgcaggatatccacccaaccgttccgaacccgtataatctgttgtgcgcgttaccgccgcagcgttcctggtacacggtgctggacctgaaggacgcgttcttctgtcttcgcctcgcacccaccagccagccactgtttgcctttgaatggcgcgatcctgatacgggccgtactgggcaattaacatggacccgtttgccgcagggctttaagaacagtcccaccatttttgatgaggctcttcgtcgcgacctcgcaaatttccgcatccaacacccacaggtaacgttactccagtatgtcgatgatcttttgttagcgggtgccaccaaacaggactgcttggaaggaacgaaagcacttctcttggaactctcggatttaggttatcgtgtgtccgccaagaaagctcagatttgtcgccgcgaagtgacatacttaggctattcattgcgtgatggtcaacgttggcttactgaggcgcgcaagaagaccgttgttcaaatccccgcccctaagaccccgaaacagatgcgtgaatttcttggcacggcaggtttttgccgtttgtggattcctggctttgctacgttagcggcacccctctatccactcacgaaagagaaaggagaattctcttgggctccagaacatcagaaagcgtttgacgccatcaagaaagcgttattaagcgctcctgctcttgcattgcccgatgtcaccaaaccattcacgctctacgtggatgaacgcaaaggcgtagcccgcggtgtgttgacacagaccttaggaccttggcgtcgtcccgtggcctacctctcgaagaaacttgacccagttgcaagtggttggcctgtctgcttgaaagctattgccgcagttgcaatcctcgtcaaagatgccgacaaacttactttgggccagaacattactgttattgcaccacacgcccttgaaaacatcgttcgtcagccacctgatcgctggatgaccaatgctcgcatgacgcattatcagagcctcttgcttaccgaacgcgtgacttttgctccacctgcagccttaaaccccgcaacccttttacccgaagaaacagatgagcctgtgacgcatgactgtcaccagctcttgattgaagaaactggcgtacgcaaagacctcaccgatattccattaacaggtgaggtacttacgtggtttaccgaggggtcctcttatgtcgtcgaaggcaaacgtatggctggtgccgccgttgttgatggcacccgtactatctgggcaagcagcttacccgaaggcacgagtgctcagaaagcagagttgatggccttgacccaagccttacgccttgctgaagggaaatcgatcaatatttacaccgactcacgctatgcattcgccacggcacatgtacacggtgccatctacaaacaacgtggtttgttaacttctgctggccgcgagattaagaacaaagaagaaatcctttccttacttgaagccttacacctccccaaacgtctcgctattattcattgtccagggcatcagaaagcaaaagatcctatcagccgtgggaatcaaatggcagatcgtgtcgctaaacaggcagcccaaggcgttaacttgttgcccatgattgagacccctaaagctcca

SEQ ID NO: 150 - protein, 687 aa, synthetic construct
  REGION 1..687: note = Engineered reverse transcriptase variants
MHHHHHHGGSGVLTLQLDDEYRLYSPLVKPDQNIQFWLEQFPQAWAETAGMGLAKQVPPQVIQLKASATPVSVRQYPLSKEAQEGIRPHVQRLIQQGILVPVQSPWNTPLLPVRKPGTNDYRPVQDLREVNKRVQDIHPTVPNPYNLLCALPPQRSWYTVLDLKDAFFCLRLAPTSQPLFAFEWRDPDTGRTGQLTWTRLPQGFKNSPTIFDEALRRDLANFRIQHPQVTLLQYVDDLLLAGATKQDCLEGTKALLLELSDLGYRVSAKKAQICRREVTYLGYSLRDGQRWLTEARKKTVVQIPAPKTPKQMREFLGTAGFCRLWIPGFATLAAPLYPLTKEKGEFSWAPEHQKAFDAIKKALLSAPALALPDVTKPFTLYVDERKGVARGVLTQTLGPWRRPVAYLSKKLDPVASGWPVCLKAIAAVAILVKDADKLTLGQNITVIAPHALENIVRQPPDRWMTNARMTHYQSLLLTERVTFAPPAALNPATLLPEETDEPVTHDCHQLLIEETGVRKDLTDIPLTGEVLTWFTEGSSYVVEGKRMAGAAVVDGTRTIWASSLPEGTSAQKAELMALTQALRLAEGKSINIYTDSRYAFATAHVHGAIYKQRGLLTSAGREIKNKEEILSLLEALHLPKRLAIIHCPGHQKAKDPISRGNQMADRVAKQAAQGVNLLPMIETPKAP

SEQ ID NO: 151 - DNA, 2061 bp, synthetic construct
  misc_feature 1..2061: note = Engineered reverse transcriptase variants
  source 1..2061: mol_type = other DNA
atgcatcaccatcaccatcatggtggtagcggagtgctgacccttcagctggatgatgaatatcgcttgtacagtccgctggtcaaaccagaccaaaacattcagttctggctcgaacagtttccgcaagcgtgggctgaaactgctggcatgggcctggccaaacaggttcctcctcaggtaatccagttaaaggcatctgccacgccggtgtcagttcgtcagtatccgctgtcgaaagaagcgcaagaggggattcgcccacacgtgcagcgtttgatccagcagggcattctggtaccggttcaaagcccctggaataccccgcttttaccagtccgcaaaccgggtacaaacgattaccgtcctgtgcaagacctgcgcgaagtcaataaacgtgtgcaggatatccacccaaccgttccgaacccgtataatctgttgtgcgcgttaccgccgcagcgttcctggtacacggtgctggacctgaaggacgcgttcttctgtcttcgcctccatcccaccagccagccactgtttgcctttgaatggcgcgatcctgatacgggccgtactgggcaattaacatggacccgtttgccgcagggctttaagaacagtcccaccatttttgatgaggctcttcgtcgcgacctcgcaaatttccgcatccaacacccacaggtaacgttactccagtatgtcgatgatcttttgttagcgggtgccaccaaacaggactgcttggaaggaacgaaagcacttctcttggaactctcggatttaggttatcgtgtgtccgccaagaaagctcagatttgtcgccgcgaagtgacatacttaggctattcattgcgtgatggtcaacgttggcttactgaggcgcgcaagaagaccgttgttcaaatccccgcccctaccaccgcgaaacagatgcgtgaatttcttggcacggcaggtgcgtgccgtttgtggattcctggctttgctaccttagcggcacccctctatccactcacgaaagagaaaggagaattctcttgggccccagaacatcagaaagcgtttgacgccatcaagaaagcgttattaagcgctcctgctcttgcattgcccgatgtcaccaaaccattcacgctctacgtggatgaacgcaaaggcgtagcccgcggtgtgttgacacagaccttaggaccttggcgtcgtcccgtggcctacctctcgaagaaacttgacccagttgcaagtggttggcctgtctgcttgaaagctattgccgcagttgcaatcctcgtcaaagatgccgacaaacttactttgggccagaacattactgttattgcaccacacgcccttgaaaacatcgttcgtcagccacctgatcgctggatgaccaatgctcgcatgacgcattatcagagcctcttgcttaccgaacgcgtgacttttgctccacctgcagccttaaaccccgcaacccttttacccgaagaaacagatgagcctgtgacgcatgactgtcaccagctcttgattgaagaaactggcgtacgcaaagacctcaccgatattccattaacaggtgaggtacttacgtggtttaccgacgggtcctcttatgtcgtcgaaggcaaacgtatggctggtgccgccgttgttgatggcacccgtactatctgggcaagcagcttacccgaaggcacgagtgctcagaaagcagaattgatggccttgacccaagccttacgccttgctgaagggaaatcgatcaatatttacaccgactcacgctatgcattcgccacggcacatgtacacggtgccatctacaaacaacgtggtttgttaacttctgctggccgcgagattaagaacaaagaagaaatcctttccttacttgaagccttacacctccccaaacgtctcgctattattcattgtccagggcatcagaaagcaaaagatcctatcagccgtgggaatcaaatggcagatcgtgtcgctaaacaggcagcccaaggcgttaacttgttgcccatgattgagacccctaaagctcca

SEQ ID NO: 152 - protein, 687 aa, synthetic construct
  REGION 1..687: note = Engineered reverse transcriptase variants
MHHHHHHGGSGVLTLQLDDEYRLYSPLVKPDQNIQFWLEQFPQAWAETAGMGLAKQVPPQVIQLKASATPVSVRQYPLSKEAQEGIRPHVQRLIQQGILVPVQSPWNTPLLPVRKPGTNDYRPVQDLREVNKRVQDIHPTVPNPYNLLCALPPQRSWYTVLDLKDAFFCLRLHPTSQPLFAFEWRDPDTGRTGQLTWTRLPQGFKNSPTIFDEALRRDLANFRIQHPQVTLLQYVDDLLLAGATKQDCLEGTKALLLELSDLGYRVSAKKAQICRREVTYLGYSLRDGQRWLTEARKKTVVQIPAPTTAKQMREFLGTAGACRLWIPGFATLAAPLYPLTKEKGEFSWAPEHQKAFDAIKKALLSAPALALPDVTKPFTLYVDERKGVARGVLTQTLGPWRRPVAYLSKKLDPVASGWPVCLKAIAAVAILVKDADKLTLGQNITVIAPHALENIVRQPPDRWMTNARMTHYQSLLLTERVTFAPPAALNPATLLPEETDEPVTHDCHQLLIEETGVRKDLTDIPLTGEVLTWFTDGSSYVVEGKRMAGAAVVDGTRTIWASSLPEGTSAQKAELMALTQALRLAEGKSINIYTDSRYAFATAHVHGAIYKQRGLLTSAGREIKNKEEILSLLEALHLPKRLAIIHCPGHQKAKDPISRGNQMADRVAKQAAQGVNLLPMIETPKAP

SEQ ID NO: 153 - DNA, 2061 bp, synthetic construct
  misc_feature 1..2061: note = Engineered reverse transcriptase variants
  source 1..2061: mol_type = other DNA
atgcatcaccatcaccatcatggtggtagcggagtgctgacccttcagctggatgatgaatatcgcttgtacagtccgctggtcaaaccagaccaaaacattcagttctggctcgaacagtttccgcaagcgtgggctgaaactggtggcatgggcctggccaaacaggttcctcctcaggtaatccagttaaaggcatctgccacgccggtgtcagttcgtcagtatccgctgtcgaaagaagcgcaagaggggattcgcccacacattcagcgtttgatccagcagggcattctggtaccggttcaaagcccctggaataccccgcttttaccagtccgtaaaccgggtacaaacgattaccgtcctgtgcaagacctgcgcgaagtcaataaacgtgtgcaggatatccacccaaccgttccgaacccgtataatctgttgtgcgcgttaccgccgcagcgttcctggtacacggtgctggacctgaaggacgcgttcttctgtcttcgcctcgcacccaccagccagccactgtttgcctttgaatggcgcgatcctgatacgggccgtactgggcaattaacatggacccgtttgccgcagggctttaagaacagtcccgcgatctttgatgaggctcttcaccgcgacctcgcaaatttccgcatccaacacccacaggtaacgttactccagtatgtcgatgatcttttgttagcgggtgccaccaaacaggactgcttggaaggaacgaaagcacttctcttggaactctcggatttaggttatcgtgtgtccgccaagaaagctcagatttgtcgccgcgaagtgacatacttaggctattcattgcgtgatggtcaacgttggcttactgaggcgcgcaagaagaccgttgttcaaatccccgcccctacgaccccgaaacagatgcgtgaatttcttggcacggcaggtttttgccgtttgtggattcctggctttgctgaattagcggcacccctctatccactcacgaaagagaaaggagaattctcttgggccccagaacatcagaaagcgtttgacgccatcaagaaagcgttattaagcgctcctgctcttgcattgcccgatgtcaccaaaccattcacgctctacgtggatgaacgcaaaggcgtagcccgcggtgtgttgacacagaccttaggaccttggcgtcgtcccgtggcctacctctcgaagaaacttgacccagttgcaagtggttggcctgtctgcttgaaagctattgccgcagttgcaatcctcgtcaaagatgccgacaaacttactttgggccagaacattactgttattgcaccacacgcccttgaaaacatcgttcgtcagccacctgatcgctggatgaccaatgctcgcatgacgcattatcagagcctcttgcttaccgaacgcgtgacttttgctccacctgcagccttaaaccccgcaacccttttacccgaagaaacagatgagcctgtgacgcatgactgtcaccagctcttgattgaagaaactggcgtacgcaaagacctcaccgatattccattaacaggtgaggtacttacgtggtttaccgacgggtcctcttatgtcgtcgaaggcaaacgtatggctggtgccgccgttgttgatggcacccgtactatctgggcaagcagcttacccgaaggcacgagtgctcagaaagcagagttgatggccttgacccaagccttacgccttgctgaagggaaatcgatcaatatttacaccgactcacgctatgcattcgccacggcacatgtacacggtgccatctacaaacaacgtggtttgttaacttctgctggccgcgagattaagaacaaagaagaaatcctttccttacttgaagccttacacctccccaaacgtctcgctattattcattgtccagggcatcagaaagcaaaagatcctatcagccgtgggaatcaaatggcagatcgtgtcgctaaacaggcagcccaaggcgttaacttgttgcccatgattgagacccctaaagctcca

SEQ ID NO: 154 - protein, 687 aa, synthetic construct
  REGION 1..687: note = Engineered reverse transcriptase variants
MHHHHHHGGSGVLTLQLDDEYRLYSPLVKPDQNIQFWLEQFPQAWAETGGMGLAKQVPPQVIQLKASATPVSVRQYPLSKEAQEGIRPHIQRLIQQGILVPVQSPWNTPLLPVRKPGTNDYRPVQDLREVNKRVQDIHPTVPNPYNLLCALPPQRSWYTVLDLKDAFFCLRLAPTSQPLFAFEWRDPDTGRTGQLTWTRLPQGFKNSPAIFDEALHRDLANFRIQHPQVTLLQYVDDLLLAGATKQDCLEGTKALLLELSDLGYRVSAKKAQICRREVTYLGYSLRDGQRWLTEARKKTVVQIPAPTTPKQMREFLGTAGFCRLWIPGFAELAAPLYPLTKEKGEFSWAPEHQKAFDAIKKALLSAPALALPDVTKPFTLYVDERKGVARGVLTQTLGPWRRPVAYLSKKLDPVASGWPVCLKAIAAVAILVKDADKLTLGQNITVIAPHALENIVRQPPDRWMTNARMTHYQSLLLTERVTFAPPAALNPATLLPEETDEPVTHDCHQLLIEETGVRKDLTDIPLTGEVLTWFTDGSSYVVEGKRMAGAAVVDGTRTIWASSLPEGTSAQKAELMALTQALRLAEGKSINIYTDSRYAFATAHVHGAIYKQRGLLTSAGREIKNKEEILSLLEALHLPKRLAIIHCPGHQKAKDPISRGNQMADRVAKQAAQGVNLLPMIETPKAP

SEQ ID NO: 155 - DNA, 2061 bp, synthetic construct
  misc_feature 1..2061: note = Engineered reverse transcriptase variants
  source 1..2061: mol_type = other DNA
atgcatcaccatcaccatcatggtggtagcggagtgctgacccttcagctggatgatgaatatcgcttgtacagtccgctggtcaaaccagaccaaaacattcagttctggctcgaacagtttccgcaagcgtgggctgaaactgcaggcatgggcctggccaaacaggttcctcctcaggtaatccaattaaaggcatctgccacgccggtgtcagttcgtcagtatccgctgtcgaaagaagcgcaagaggggattcgcccacacgtgcagcgtttgatccagcagggcattctggtaccggttcaaagcccctggaataccccgcttttaccagtccgcaaaccgggtacaaacgattaccgtcctgtgcaagacctgcgcgaagtcaataaacgtgtgcaggatatccacccaaccgttccgaacccgtataatctgttgtgcgcgttaccgccgcagcgttcctggtacacggtgctggacctgaaggacgcgttcttctgtcttcgcctccaccccaccagccagccactgtttgcctttgaatggcgcgatcctgatacgggccgtactgggcaattaacatggacccgtttgccgcagggctttaagaacagtcccaccatttttgatgaggctcttcaccgcgacctcgcaaatttccgcatccaacacccacaggtaacgttactccagtatgtcgatgatcttttgttagcgggtgccaccaaacaggactgcttggaaggaacgaaagcacttctcttggaactctcgaacttaggttatcgtgtgtccgccaagaaagctcagatttgtcgccgcgaagtgacatacttaggctattcattgcgtgatggtcaacgttggcttactgaggcgcgcaagcgcaccgttgttcaacagcccgcccctaccaccgcgaaacagatgcgtgaatttcttggcacggcaggtttctgccgtttgtggattcctggctttgctaccttagcggcacccctctatccactcacgaaagaaaaaggagaattctcttgggccccagaacatcagaaagcgtttgacgccatcaagaaagcgttattaagcgctcctgctcttgcattgcccgatgtcaccaaaccattcacgctctacgtggatgaacgcaaaggcgtagcccgcggtgtgttgacacagaccttaggaccttggcgtcgtcccgtggcctacctctcgaagaaacttgacccagttgcaagtggttggcctgtctgcttgaaagctattgccgcagttgcaatcctcgtcaaagatgccgacaaacttactttgggccagaacattactgttcgcgcaccacacgcccttgaaaacatcgttcgtcagccacctgatcgctggatgaccaatgctcgcatgacgcattatcagagcctcttgcttaccgaacgcgtgacttttgctccacctgcagccttaaaccccgcaacccttttacccgaagaaacagatgagcctgtgacgcatgactgtcaccagctcttgattgaagaaactggcgtacgcaaagacctcaccgatattccattaacaggtgaggtacttacgtggtttaccgacgggtcctcttatgtcgtcgaaggcaaacgtatggctggtgccgccgttgttgatggcacccgtactatctgggcaagcagcttacccgaaggcacgagtgctcagaaagcacaattgatggccttgacccaagccttacgccttgctgaagggaaatcgatcaatatttacaccgactcacgctatgcattcgccacggcacatgtacacggtgccatctacaaacaacgtggtttgttaacttctgctggccgcgagattaagaacaaagaagaaatcctttccttacttgaagccttacacctccccaaacgtctcgctattattcattgtccagggcatcagaaagcaaaagatcctatcagccgtgggaatcaaatggcagatcgtgtcgctaaacaggcagcccaaggcgttaacttgttgcccatgattgagacccctaaagctcca

SEQ ID NO: 156 - protein, 687 aa, synthetic construct
  REGION 1..687: note = Engineered reverse transcriptase variants
MHHHHHHGGSGVLTLQLDDEYRLYSPLVKPDQNIQFWLEQFPQAWAETAGMGLAKQVPPQVIQLKASATPVSVRQYPLSKEAQEGIRPHVQRLIQQGILVPVQSPWNTPLLPVRKPGTNDYRPVQDLREVNKRVQDIHPTVPNPYNLLCALPPQRSWYTVLDLKDAFFCLRLHPTSQPLFAFEWRDPDTGRTGQLTWTRLPQGFKNSPTIFDEALHRDLANFRIQHPQVTLLQYVDDLLLAGATKQDCLEGTKALLLELSNLGYRVSAKKAQICRREVTYLGYSLRDGQRWLTEARKRTVVQQPAPTTAKQMREFLGTAGFCRLWIPGFATLAAPLYPLTKEKGEFSWAPEHQKAFDAIKKALLSAPALALPDVTKPFTLYVDERKGVARGVLTQTLGPWRRPVAYLSKKLDPVASGWPVCLKAIAAVAILVKDADKLTLGQNITVRAPHALENIVRQPPDRWMTNARMTHYQSLLLTERVTFAPPAALNPATLLPEETDEPVTHDCHQLLIEETGVRKDLTDIPLTGEVLTWFTDGSSYVVEGKRMAGAAVVDGTRTIWASSLPEGTSAQKAQLMALTQALRLAEGKSINIYTDSRYAFATAHVHGAIYKQRGLLTSAGREIKNKEEILSLLEALHLPKRLAIIHCPGHQKAKDPISRGNQMADRVAKQAAQGVNLLPMIETPKAP

SEQ ID NO: 157 - DNA, 2061 bp, synthetic construct
  misc_feature 1..2061: note = Engineered reverse transcriptase variants
  source 1..2061: mol_type = other DNA
atgcatcaccatcaccatcatggtggtagcggagtgctgacccttcagctggatgatgaatatcgcttgtacagtccgctggtcaaaccagaccaaaacattcagttctggctcgaacagtttccgcaagcgtgggctgaaactgctggcatgggcctggccaaacaggttcctcctcaggtaatccaattaaaggcatctgccacgccggtgtcagttcgtcagtatccgctgtcgaaagaagcgcaagaggggattcgcccacacgtgcagcgtttgatccagcagggcattctggtaccggttcaaagcccctggaataccccgcttttaccagtccgcaaaccgggtacaaacgattaccgtcctgtgcaagacctgcgcgaagtcaataaacgtgtgcaggatatccacccaaccgttccgaacccgtataatctgttgtgcgcgttaccgccgcagcgttcctggtacacggtgctggacctgaaggacgcgttcttctgtcttcctctccaccccaccagccagccactgtttgcctttgaatggcgcgatcctgatacgggccgtactgggcaattaacatggacccgtttgccgcagggctttaagaacagtcccaccatttttgatgaggctcttcaccgcgacctcgcaaatttccgcatccaacacccacaggtaacgttactccagtatgtcgatgatcttttgttagcgggtgccaccaaacaggactgcttggaaggaacgaaagcacttctcttggaactctcggatttaggttatcgtgtgtccgccaagaaagctcagatttgtcgccgcgaagtgacatacttaggctattcattgcgtgatggtcaacgttggcttactgaggcgcgcaaggagaccgttgttcaaatccccgcccctaccaccgcgaagcagatgcgtgaatttcttggcacggcaggtttctgccgtttgtggattcctggctttgctaccttagcggcacccctctatccactcacgaaagagaaaggagaattctcttgggccccagaacatcagaaagcgtttgacgccatcaagaaagcgttattaagcgctcctgctcttgcattgcccgatgtcaccaaaccattcacgctctacgtggatgaacgcaaaggcgtagcccgcggtgtgttgacacagaccttaggaccttggcgtcgtcccgtggcctacctctcgaagaaacttgacccagttgcaagtggttggcctgtctgcttgaaagctattgccgcagttgcaatcctcgtcaaagatgccgacaaacttactttgggccagaacctgactgttattgcaccacacgcccttgaaaacatcgttcgtcagccacctgatcgctggatgaccaatgctcgcatgacgcattatcagagcctcttgcttaccgaacgcgtgacttttgctccacctgcagccttaaaccccgcaacccttttacccgaagaaacagatgagcctgtgacgcatgactgtcaccagctcttgattgaagaaactggcgtacgcccggacctcaccgatattccattaacaggtgaggtacttacgtggtttaccgatgggtcctcttatgtcgtcgaaggcaaacgtatggctggtgccgccgttgttgatggcacccgtactatctgggcaagcagcttacccgaaggcacgagtgctcagaaagcagagttgatggccttgacccaagccttacgccttgctgaagggaaatcgatcaatatttacaccgactcacgctatgcattcgccacggcacatgtacacggtgccatctacaaacaacgtggtttgttaacttctgctggccgcgagattaagaacaaagaagaaatcctttccttacttgaagccttacacctccccaaacgtctcgctattattcattgtccagggcatcagaaagcaaaagatcctatcagccgtgggaatcagatggcagatcgtgtcgctaaacaggcagcccaaggcgttaacttgttgcccatgattgagacccctaaagctcca

SEQ ID NO: 158 - protein, 687 aa, synthetic construct
  REGION 1..687: note = Engineered reverse transcriptase variants
MHHHHHHGGSGVLTLQLDDEYRLYSPLVKPDQNIQFWLEQFPQAWAETAGMGLAKQVPPQVIQLKASATPVSVRQYPLSKEAQEGIRPHVQRLIQQGILVPVQSPWNTPLLPVRKPGTNDYRPVQDLREVNKRVQDIHPTVPNPYNLLCALPPQRSWYTVLDLKDAFFCLPLHPTSQPLFAFEWRDPDTGRTGQLTWTRLPQGFKNSPTIFDEALHRDLANFRIQHPQVTLLQYVDDLLLAGATKQDCLEGTKALLLELSDLGYRVSAKKAQICRREVTYLGYSLRDGQRWLTEARKETVVQIPAPTTAKQMREFLGTAGFCRLWIPGFATLAAPLYPLTKEKGEFSWAPEHQKAFDAIKKALLSAPALALPDVTKPFTLYVDERKGVARGVLTQTLGPWRRPVAYLSKKLDPVASGWPVCLKAIAAVAILVKDADKLTLGQNLTVIAPHALENIVRQPPDRWMTNARMTHYQSLLLTERVTFAPPAALNPATLLPEETDEPVTHDCHQLLIEETGVRPDLTDIPLTGEVLTWFTDGSSYVVEGKRMAGAAVVDGTRTIWASSLPEGTSAQKAELMALTQALRLAEGKSINIYTDSRYAFATAHVHGAIYKQRGLLTSAGREIKNKEEILSLLEALHLPKRLAIIHCPGHQKAKDPISRGNQMADRVAKQAAQGVNLLPMIETPKAP

SEQ ID NO: 159 - DNA, 2061 bp, synthetic construct
  misc_feature 1..2061: note = Engineered reverse transcriptase variants
  source 1..2061: mol_type = other DNA
atgcatcaccatcaccatcatggtggtagcggagtgctgacccttcagctggatgatgaatatcgcttgtacagtccgctggtcaaaccagaccaaaacattcagttctggctcgaacagtttccgcaagcgtgggctgaaactgctggcatgggcctggccaaacaggttcctcctcaggtaatccaattaaaggcatctgccacgccggtgtcagttcgtcagtatccgctgtcgaaagaagcgcaagaggggattcgcccacacattcagcgtttgatccagcagggcattctggtaccggttcaaagcccctggaataccccgcttttaccagtccgtaaaccgggtacaaacgattaccgtcctgtgcaagacctgcgcgaagtcaataaacgtgtgcaggatatccacccaaccgttccgaacccgtataatctgttgtgcgcgttaccgccgcagcgttcctggtacacggtgctggacctgaaggacgcgttcttctgtcttcgcctccatcccaccagccagccactgtttgcctttgaatggcgcgatcctgatacgggccgtactgggcaattaacatggacccgtttgccgcagggctttaagaacagtcccaccatttttgatgaggctcttcaccgcgacctcgcaaatttccgcatccaacacccacaggtaacgttactccagtatgtcgatgatcttttgttagcgggtgccaccaaacaggactgcttggaaggaacgaaagcacttctcttggaactctcggatttaggttatcgtgtgtccgccaagaaagctcagatttgtcgccgcgaagtgacatacttaggctattcattgcgtgatggtcaacgttggcttactgaggcgcgcaagaagaccgttgttcaaatccccgcccctaccaccgcgaaacagatgcgtgaatttcttggcacggcaggtttctgccgtttgtggattcctggctttgctaccttagcggcacccctctatccactcacgaaagagaaaggagaattctcttgggccccagaacatcagaaagcgtttgacgccatcaagaaagcgttattaagcgctcctgctcttgcattgcccgatgtcaccaaaccattcacgctctacgtggatgaacgcaaaggcgtagcccgcggtgtgttgacacagaccttaggaccttggcgtcgtcccgtggcctacctctcgaagaaacttgacccagttgcaagtggttggcctgtctgcttgaaagctattgccgcagttgcaatcctcgtcaaagatgccgacaaacttactttgggccagaacattactgttattgcaccacacgcccttgaaaacatcgttcgtcagccacctgatcgctggatgaccaatgctcgcatgacgcattatcagagcctcttgcttaccgaacgcgtgacttttgctccacctgcagccttaaaccccgcaacccttttacccgaagaaacagatgagcctgtgacgcatgactgtcaccagctcttgattgaagaaactggcgtacgcaaagacctcaccgatattccattaacaggtgaggtacttacgtggtttaccgaggggtcctcttatgtcgtcgaaggcaaacgtatggctggtgccgccgttgttgatggcacccgtactatctgggcaagcagcttacccgaaggcacgagtgctcagaaagcagatttgatggccttgacccaagccttacgccttgctgaagggaaatcgatcaatatttacaccgactcacgcagcgcattcgccacggcacatgtacacggtgccatctacaaacaacgtggtttgttaacttctgctggccgcgagattaagaacaaagaagaaatcctttccttacttgaagccttacacctccccaaacgtctcgctattattcattgtccagggggtcagaaagcaaaagatcctatcagccgtgggaatcaaatggcagatcgtgtcgctaaacaggcagcccaaggcgttaacttgttgcccatgattgagacccctaaagctcca

SEQ ID NO: 160 - protein, 687 aa, synthetic construct
  REGION 1..687: note = Engineered reverse transcriptase variants
MHHHHHHGGSGVLTLQLDDEYRLYSPLVKPDQNIQFWLEQFPQAWAETAGMGLAKQVPPQVIQLKASATPVSVRQYPLSKEAQEGIRPHIQRLIQQGILVPVQSPWNTPLLPVRKPGTNDYRPVQDLREVNKRVQDIHPTVPNPYNLLCALPPQRSWYTVLDLKDAFFCLRLHPTSQPLFAFEWRDPDTGRTGQLTWTRLPQGFKNSPTIFDEALHRDLANFRIQHPQVTLLQYVDDLLLAGATKQDCLEGTKALLLELSDLGYRVSAKKAQICRREVTYLGYSLRDGQRWLTEARKKTVVQIPAPTTAKQMREFLGTAGFCRLWIPGFATLAAPLYPLTKEKGEFSWAPEHQKAFDAIKKALLSAPALALPDVTKPFTLYVDERKGVARGVLTQTLGPWRRPVAYLSKKLDPVASGWPVCLKAIAAVAILVKDADKLTLGQNITVIAPHALENIVRQPPDRWMTNARMTHYQSLLLTERVTFAPPAALNPATLLPEETDEPVTHDCHQLLIEETGVRKDLTDIPLTGEVLTWFTEGSSYVVEGKRMAGAAVVDGTRTIWASSLPEGTSAQKADLMALTQALRLAEGKSINIYTDSRSAFATAHVHGAIYKQRGLLTSAGREIKNKEEILSLLEALHLPKRLAIIHCPGGQKAKDPISRGNQMADRVAKQAAQGVNLLPMIETPKAP

SEQ ID NO: 161 - DNA, 2061 bp, synthetic construct
  misc_feature 1..2061: note = Engineered reverse transcriptase variants
  source 1..2061: mol_type = other DNA
atgcatcaccatcaccatcatggtggtagcggagtgctgacccttcagctggatgatgaatatcgcttgtacagtccgctggtcaaaccagaccaaaacattcagttctggctcgaacagtttccgcaagcgtgggctgaaactggtggcatgggcctggccaaacaggttcctcctcaggtaatcctgttaaaggcatctgccacgccggtgtcagttcgtcagtatccgctgtcgaaagaagcgcaagaggggattcgcccacacattcagcgtttgatccagcagggcattctggtaccggttcaaagcccctggaataccccgcttttaccagtccgcaaaccgggtacaaacgattaccgtcctgtgcaagacctgcgcgaagtcaataaacgtgtgcaggatatccacccaaccgttccgaacccgtataatctgttgtgcgcgttaccgccgcagcgttcctggtacacggtgctggacctgaaggacgcgttcttctgtcttcgcctccatcccaccagccagccactgtttgcctttgaatggcgcgatcctgatacgggccgtactgggcaattaacatggacccgtttgccgcagggctttaagaacagtcccacgctgtttgatgaggctcttcaccgcgacctcgcaaatttccgcatccaacacccacaggtaacgttactccagtatgtcgatgatcttttgttagcgggtgccaccaaacaggactgcttggaaggaacgaaagcacttctcttggaactctcggatttaggttatcgtgtgtccgccaagaaagctcagatttgtcgccgcgaagtgacatacttaggctattcattgcgtgatggtcaacgttggcttactgaggcgcgcaagaagaccgttgttcaaatccccgcccctaagaccgcgaaacagatgcgtgaatttcttggcacggcaggtgcgtgccgtttgtggattcctggctttgctacgttagcggcacccctctatccactcacgaaagagaaaggagaattctcttgggccccagaacatcagaaagcgtttgacgccatcaagaaagcgttattaagcgctcctgctcttgcattgcccgatgtcaccaaaccattcacgctctacgtggatgaacgcaaaggcgtagcccgcggtgtgttgacacagaccttaggaccttggcgtcgtcccgtggcctacctctcgaagaaacttgacccagttgcaagtggttggcctgtctgcttgaaagctattgccgcagttgcaatcctcgtcaaagatgccgacaaacttactttgggccagaacattactgttattgcaccacacgcccttgaaaacatcgttcgtcagccacctgatcgctggatgaccaatgctcgcatgacgcattatcagagcctcttgcttaccgaacgcgtgacttttgctccacctgcagccttaaaccccgcaacccttttacccgaagaaacagatgagcctgtgacgcatgactgtcaccagctcttgattgaagaaactggcgtacgcaaagacctcaccgatattccattaacaggtgaggtacttacgtggtttaccgacgggtcctcttatgtcgtcgaaggcaaacgtatggctggtgccgccgttgttgatggcacccgtactatctgggcaagcagcttacccgaaggcacgagtgctcagaaagcagagttgatggccttgacccaagccttacgccttgctgaagggaaatcgatcaatatttacaccgactcacgcagcgcattcgccacggcacatgtacacggtgccatctacaaacaacgtggtttgttaacttctgctggccgcgagattaagaacaaagaagaaatcctttccttacttgaagccttacacctccccaaacgtctcgctattattcattgtccagggggtcagaaagcaaaagatcctatcagccgtgggaatcaaatggcagatcgtgtcgctaaacaggcagcccaaggcgttaacttgttgcccatgattgagacccctaaagctcca

SEQ ID NO: 162 - protein, 687 aa, synthetic construct
  REGION 1..687: note = Engineered reverse transcriptase variants
MHHHHHHGGSGVLTLQLDDEYRLYSPLVKPDQNIQFWLEQFPQAWAETGGMGLAKQVPPQVILLKASATPVSVRQYPLSKEAQEGIRPHIQRLIQQGILVPVQSPWNTPLLPVRKPGTNDYRPVQDLREVNKRVQDIHPTVPNPYNLLCALPPQRSWYTVLDLKDAFFCLRLHPTSQPLFAFEWRDPDTGRTGQLTWTRLPQGFKNSPTLFDEALHRDLANFRIQHPQVTLLQYVDDLLLAGATKQDCLEGTKALLLELSDLGYRVSAKKAQICRREVTYLGYSLRDGQRWLTEARKKTVVQIPAPKTAKQMREFLGTAGACRLWIPGFATLAAPLYPLTKEKGEFSWAPEHQKAFDAIKKALLSAPALALPDVTKPFTLYVDERKGVARGVLTQTLGPWRRPVAYLSKKLDPVASGWPVCLKAIAAVAILVKDADKLTLGQNITVIAPHALENIVRQPPDRWMTNARMTHYQSLLLTERVTFAPPAALNPATLLPEETDEPVTHDCHQLLIEETGVRKDLTDIPLTGEVLTWFTDGSSYVVEGKRMAGAAVVDGTRTIWASSLPEGTSAQKAELMALTQALRLAEGKSINIYTDSRSAFATAHVHGAIYKQRGLLTSAGREIKNKEEILSLLEALHLPKRLAIIHCPGGQKAKDPISRGNQMADRVAKQAAQGVNLLPMIETPKAP

SEQ ID NO: 163 - DNA, 2061 bp, synthetic construct
  misc_feature 1..2061: note = Engineered reverse transcriptase variants
  source 1..2061: mol_type = other DNA
atgcatcaccatcaccatcatggtggtagcggagtgctgacccttcagctggatgatgaatatcgcttgtacagtccgctggtcaaaccagaccaaaacattcagttctggctcgaacagtttccgcaagcgtgggctgaaactgcaggcatgggcctggccaaacaggttcctcctcaggtaatccaattaaaggcatctgccacgccggtgtcagttcgtcagtatccgctgtcgaaagaagcgcaagaggggattcgcccacacattcagcgtttgatccagcagggcattctggtaccggttcaaagcccctggaataccccgcttttaccagtccgtaaaccgggtacaaacgattaccgtcctgtgcaagacctgcgcgaagtcaataaacgtgtgcaggatatccacccaaccgttccgaacccgtataatctgttgtgcgcgttaccgccgcagcgttcctggtacacggtgctggacctgaaggacgcgttcttctgtcttcgcctccatcccaccagccagccactgtttgcctttgaatggcgcgatcctgatacgggccgtactgggcaattaacatggacccgtttgccgcagggctttaagaacagtcccaccatttttgatgaggctcttcgtcgcgacctcgcaaatttccgcatccaacacccacaggtaacgttactccagtatgtcgatgatcttttgttagcgggtgccaccaaacaggactgcttggaaggaacgaaagcacttctcttggaactctcggatttaggttatcgtgtgtccgccaagaaagctcagatttgtcgccgcgaagtgacatacttaggctattcattgcgtgatggtcaacgttggcttactgaggcgcgcaagaagaccgttgttcaaatccccgcccctaagaccgcgaaacagatgcgtgaatttcttggcacggcaggtttttgccgtttgtggattcctggctttgctaccttagcggcacccctctatccactcacgaaagagaaaggagaattctcttgggccccagaacatcagaaagcgtttgacgccatcaagaaagcgttattaagcgctcctgctcttgcattgcccgatgtcaccaaaccattcacgctctacgtggatgaacgcaaaggcgtagcccgcggtgtgttgacacagaccttaggaccttggcgtcgtcccgtggcctacctctcgaagaaacttgacccagttgcaagtggttggcctgtctgcttgaaagctattgccgcagttgcaatcctcgtcaaagatgccgacaaacttactttgggccagaacattactgttattgcaccacacgcccttgaaaacatcgttcgtcagccacctgatcgctggatgaccaatgctcgcatgacgcattatcagagcctcttgcttaccgaacgcgtgacttttgctccacctgcagccttaaaccccgcaacccttttacccgaagaaacagatgagcctgtgacgcatgactgtcaccagctcttgattgaagaaactggcgtacgcaaagacctcaccgatattccattaacaggtgaggtacttacgtggtttaccgaggggtcctcttatgtcgtcgaaggcaaacgtatggctggtgccgccgttgttgatggcacccgtactatctgggcaagcagcttacccgaaggcacgagtgctcagaaagcagatttgatggccttgacccaagccttacgccttgctgaagggaaatcgatcaatatttacaccgactcacgctatgcattcgccacggcacatgtacacggtgccatctacaaacaacgtggtttgttaacttctgctggccgcgagattaagaacaaagaagaaatcctttccttacttgaagccttacacctccccaaacgtctcgctattattcattgtccagggcatcagaaagcaaaagatcctatcagccgtgggaatcaaatggcagatcgtgtcgctaaacaggcagcccaaggcgttaacttgttgcccatgattgagacccctaaagctcca

SEQ ID NO: 164 - protein, 687 aa, synthetic construct
  REGION 1..687: note = Engineered reverse transcriptase variants
MHHHHHHGGSGVLTLQLDDEYRLYSPLVKPDQNIQFWLEQFPQAWAETAGMGLAKQVPPQVIQLKASATPVSVRQYPLSKEAQEGIRPHIQRLIQQGILVPVQSPWNTPLLPVRKPGTNDYRPVQDLREVNKRVQDIHPTVPNPYNLLCALPPQRSWYTVLDLKDAFFCLRLHPTSQPLFAFEWRDPDTGRTGQLTWTRLPQGFKNSPTIFDEALRRDLANFRIQHPQVTLLQYVDDLLLAGATKQDCLEGTKALLLELSDLGYRVSAKKAQICRREVTYLGYSLRDGQRWLTEARKKTVVQIPAPKTAKQMREFLGTAGFCRLWIPGFATLAAPLYPLTKEKGEFSWAPEHQKAFDAIKKALLSAPALALPDVTKPFTLYVDERKGVARGVLTQTLGPWRRPVAYLSKKLDPVASGWPVCLKAIAAVAILVKDADKLTLGQNITVIAPHALENIVRQPPDRWMTNARMTHYQSLLLTERVTFAPPAALNPATLLPEETDEPVTHDCHQLLIEETGVRKDLTDIPLTGEVLTWFTEGSSYVVEGKRMAGAAVVDGTRTIWASSLPEGTSAQKADLMALTQALRLAEGKSINIYTDSRYAFATAHVHGAIYKQRGLLTSAGREIKNKEEILSLLEALHLPKRLAIIHCPGHQKAKDPISRGNQMADRVAKQAAQGVNLLPMIETPKAP

SEQ ID NO: 165 - DNA, 2061 bp, synthetic construct
  misc_feature 1..2061: note = Engineered reverse transcriptase variants
  source 1..2061: mol_type = other DNA
atgcatcaccatcaccatcatggtggtagcggagtgctgacccttcagctggaggatgaatatcgcttgtacagtccgctggtcaaaccagaccaaaacattcagttctggctcgaacagtttccgcaagcgtgggctgaaactgcaggcatgggcctggccaaacaggttcctcctcaggtaatccaattaaaggcatctgccacgccggtgtcagttcgtcagtatccgctgtcgaaagaagcgcaagaggggattcgcccacacgtgcagcgtttgctgcagcagggcattctggtaccgtgtcaaagcccctggaataccccgcttttaccagtccgcaaaccgggtacaaacgattaccgtcctgtgcaagacctgcgcgaagtcaataaacgtgtgcaggatatccacccaaccgttccgaacccgtataatctgttgtgcgcgttaccgccgcagcgttcctggtacacggtgctggacctgaaggacgcgttcttctgtcttcgcctccaccccaccagccagccactgtttgcctttgaatggcgcgatcctgatacgggccgtactgggcaattaacatggacccgtttgccgcagggctttaagaacagtcccaccatttttgatgaggctcttcaccgcgacctcgcaaatttccgcatccaacacccacaggtaacgttactccagtatgtcgatgatcttttgttagcgggtgccaccaaacaggactgcttggaaggaacgaaagcacttctcttggaactcggcgatttaggttatcgtgtgtccgccaagaaagctcagatttgtcgccgcgaagtgacatacttaggctattcattgcgtgatggtcaacgttggcttactgaggcgcgcaagaagaccgttgttcaaatccccgcccctaccaccgcgaaacagatgcgtgaatttcttggcacggcaggtttctgccgtttgtggattcctggctttgctaccttagcggcacccctctatccactcacgaaagagaaaggagaattctcttgggccccagaacatcagaaagcgtttgacgccatcaagaaagcgttattaagcgctcctgctcttgggttgcccgatgtcaccaaaccattcacgctctacgtggatgaacgcaaaggcgtagcccgcggtgtgttgacacagaccttaggaccttggcgtcgtcccgtggcctacctctcgaagaaacttgacccagttgcaagtggttggcctgtctgcttgaaagctattgccgcagttgcaatcctcgtcaaagatgccgacaaacttactttgggccagaacattactgttattgcaccacacgcccttgaaaacatcgttcgtcagccacctgatcgctggctgacgaatgctcgcatgacgcattatcagagcctcttgcttaccgaacgcgtgacttttgctccacctgcagccttaaaccccgcaacccttttacccgaagaaacagatgagcctgtgacgcatgactgtcaccagctcttgattgaagaaactggcgtacgcaaagacctcaccgatattccattaacaggtgaggtacttacgtggtttaccgatgggtcctcttatgtcgtcgaaggcaaacgtatggctggtgccgccgttgttactggcacccgtactatctgggcaagcagcttacccgaaggcacgagtgctcagaaagcagagttgatggccttgacccaagccttacgccttgctgaagggaaatcgatcaatatttacaccgactcacgctatgcattcgccacggcacatgtacacggtgccatctacaaacaacgtggtttgttaacttctgctggccgcgagattaagaacaaagaagaaatcctttccttacttgaagccttacacctccccaaacgtctcgctattattcattgtccagggcatcagaaagcaaaagatcctatcagccgtgggaatcaaatggcagatcgtgtcgctaaacaggcagcccaaggcgttaacttgttgcccatgattgagacccctaaagctcca

SEQ ID NO: 166 - protein, 687 aa, synthetic construct
  REGION 1..687: note = Engineered reverse transcriptase variants
MHHHHHHGGSGVLTLQLEDEYRLYSPLVKPDQNIQFWLEQFPQAWAETAGMGLAKQVPPQVIQLKASATPVSVRQYPLSKEAQEGIRPHVQRLLQQGILVPCQSPWNTPLLPVRKPGTNDYRPVQDLREVNKRVQDIHPTVPNPYNLLCALPPQRSWYTVLDLKDAFFCLRLHPTSQPLFAFEWRDPDTGRTGQLTWTRLPQGFKNSPTIFDEALHRDLANFRIQHPQVTLLQYVDDLLLAGATKQDCLEGTKALLLELGDLGYRVSAKKAQICRREVTYLGYSLRDGQRWLTEARKKTVVQIPAPTTAKQMREFLGTAGFCRLWIPGFATLAAPLYPLTKEKGEFSWAPEHQKAFDAIKKALLSAPALGLPDVTKPFTLYVDERKGVARGVLTQTLGPWRRPVAYLSKKLDPVASGWPVCLKAIAAVAILVKDADKLTLGQNITVIAPHALENIVRQPPDRWLTNARMTHYQSLLLTERVTFAPPAALNPATLLPEETDEPVTHDCHQLLIEETGVRKDLTDIPLTGEVLTWFTDGSSYVVEGKRMAGAAVVTGTRTIWASSLPEGTSAQKAELMALTQALRLAEGKSINIYTDSRYAFATAHVHGAIYKQRGLLTSAGREIKNKEEILSLLEALHLPKRLAIIHCPGHQKAKDPISRGNQMADRVAKQAAQGVNLLPMIETPKAP

SEQ ID NO: 167 - DNA, 2061 bp, synthetic construct
  misc_feature 1..2061: note = Engineered reverse transcriptase variants
  source 1..2061: mol_type = other DNA
atgcatcaccatcaccatcatggtggtagcggagtgctgacccttcagctggaggatgaatatcgcttgtacagtccgctggtcaaaccagaccaaaacattcagttctggctcgaacagtttccgcaagcgtgggctgaaactgcaggcatgggcctggccaaacaggttcctcctcaggtaatccaattaaaggcatctgccacgccggtgtcagttcgtcagtatccgctgtcgaaagaagcgcaagaggggattcgcccacacgtgcagcgtttgatccagcagggcattctggtaccggttcaaagcccctggaataccccgcttttaccagtccgcaaaccgggtacaaacgattaccgtcctgtgcaagacctgcgcgaagtcaataaacgtgtgcaggatatccacccaaccgttccgaacccgtataatctgttgtgcgcgttaccgccgcagcgttcctggtacacggtgctggacctgaaggacgcgttcttctgtcttcgcctccaccccaccagccagccactgtttgcctttgaatggcgcgatcctgatacgggccgtactgggcaattaacatggacccgtttgccgcagggctttaagaacagtcccaccatttttgatgaggctcttcaccgcgacctcgcaaatttccgcatccaacacccacaggtaacgttactccagtatgtcgatgatcttttgttagcgggtgccaccaaacaggactgcttggaaggaacgaaagcacttctcttggaactcagcgatttaggttatcgtgtgtccgccaagaaagctcagatttgtcgccgcgaagtgacatacttaggctattcattgcgtgatggtcaacgttggcttactgaggcgcgcaagaagaccgttgttcaaatccccgcccctaccaccgcgaaacagatgcgtgaatttcttggcacggcaggtttctgccgtttgtggattcctggctttgctaccttagcggcacccctctatccactcacgaaagagaaaggagaattctcttgggccccagaacatcagaaagcgtttgacgccatcaagaaagcgttattaagcgctcctgctcttgcattgcccgatgtcaccaaaccattcacgctctacgtggatgaacgcaaaggcgtagcccgcggtgtgttgacacagaccttaggaccttggcgtcgtcccgtggcctacctctcgaagaaacttgacccagttgcaagtggttggcctgtctgcttgcgcgctattgccgcagttgcaatcctcgtcaaagatgccgacaaacttactttgggccagaacattactgttattgcaccacacgcccttgaaaacatcgttcgtcagccacctgatcgctggatgtcgaatgctcgcatgacgcattatcaggcgctcttgcttaccgaacgcgtgacttttgctccacctgcagccttaaaccccgcaacccttttacccgaagaaacagatgagcctgtgacgcatgactgtcaccagctcttgattgaagaaactggcgtacgcaaagacctcaccgatattccattaacaggtgaggtacttacgtggtttaccgatgggtcctcttatgtcgtcgaaggcaaacgtatggctggtgccgccgttgttgatggcacccgtactatctgggcaagcagcttacccgaaggcacgagtgctcagaaagcagagttgatggccttgacccaagccttacgccttgctgaagggaaatcgatcaatatttacaccgactcacgctatgcattcgccacggcacatgtacacggtgccatctacaaacaacgtggtttgttaacttctgctggccgcgagattaagaacaaagaagaaatcctttccttacttgaagccttacacctccccaaacgtctcgctattattcattgtccagggcatcagaaagcaaaagatcctatcagccgtgggaatcaaatggcagatcgtgtcgctaaacaggcagcccaaggcgttaacttgttgcccatgattgagacccctaaagctcca

SEQ ID NO: 168 - protein, 687 aa, synthetic construct
  REGION 1..687: note = Engineered reverse transcriptase variants
MHHHHHHGGSGVLTLQLEDEYRLYSPLVKPDQNIQFWLEQFPQAWAETAGMGLAKQVPPQVIQLKASATPVSVRQYPLSKEAQEGIRPHVQRLIQQGILVPVQSPWNTPLLPVRKPGTNDYRPVQDLREVNKRVQDIHPTVPNPYNLLCALPPQRSWYTVLDLKDAFFCLRLHPTSQPLFAFEWRDPDTGRTGQLTWTRLPQGFKNSPTIFDEALHRDLANFRIQHPQVTLLQYVDDLLLAGATKQDCLEGTKALLLELSDLGYRVSAKKAQICRREVTYLGYSLRDGQRWLTEARKKTVVQIPAPTTAKQMREFLGTAGFCRLWIPGFATLAAPLYPLTKEKGEFSWAPEHQKAFDAIKKALLSAPALALPDVTKPFTLYVDERKGVARGVLTQTLGPWRRPVAYLSKKLDPVASGWPVCLRAIAAVAILVKDADKLTLGQNITVIAPHALENIVRQPPDRWMSNARMTHYQALLLTERVTFAPPAALNPATLLPEETDEPVTHDCHQLLIEETGVRKDLTDIPLTGEVLTWFTDGSSYVVEGKRMAGAAVVDGTRTIWASSLPEGTSAQKAELMALTQALRLAEGKSINIYTDSRYAFATAHVHGAIYKQRGLLTSAGREIKNKEEILSLLEALHLPKRLAIIHCPGHQKAKDPISRGNQMADRVAKQAAQGVNLLPMIETPKAP

SEQ ID NO: 169 - DNA, 2061 bp, synthetic construct
  misc_feature 1..2061: note = Engineered reverse transcriptase variants
  source 1..2061: mol_type = other DNA
atgcatcaccatcaccatcatggtggtagcggagtgctgacccttcagctggatgatgaatatcgcttgtacagtccgctggtcaaaccagaccaaaacattcagttctggctcgaacagtttccgcaagcgtgggctgaaactgcaggcatgggcctggccaaacaggttcctcctcaggtaatccagttaaaggcatctgcgacgccggtgtcagttcgtcagtatccgctgtcgaaagaagcgcaagaggggattcgcccacacgtgcagcgtttgatccagcagggcattctggtaccggttcaaagcccctggaataccccgcttttaccagtccgcaaaccgggtacaaacgattaccgtcctgtgcaagacctgcgcgaagtcaataaacgtgtgcaggatatccacccaaccgttccgaacccgtataatctgttgtgcgcgttaccgccgcagcgttcctggtacacggtgctggacctgaaggacgcgtacttctgtcttcgcctccaccccaccagccagccactgtttgcctttgaatggcgcgatcctgatacgggccgtactgggcaattaacatggacccgtttgccgcagggctttaagaacagtcccaccatttttgatgaggctcttcaccgcgacctcgcaaatttccgcatccaacacccacaggtaacgttactccagtatgtcgatgatcttttgttagcgggtgccaccaaacaggactgcttggaaggaacgaaagcacttctcttggaactctcgaacttaggttatcgtgtgtccgccaagaaagctcagatttgtcgccgcgaagtgacatacttaggctattcattgcgtgatggtcaacgttggcttactgaggcgcgcaagaagaccgttgttcaaatccccgcccctaccaccgcgaaacagatgcgtgaatttcttggcacggcaggtttctgccgtttgtggattcctggctttgctaccttagcggcacccctctatccactcacgaaagagaaaggagaattctcttgggccccagaacatcagaaagcgtttgacgccatcaagaaagcgttattaagcgctcctgctcttgcattgcccgatgtcaccaaaccattcacgctctacgtggatgaacgcaaaggcgtagcccgcggtgtgttgacacagaccttaggaccttggcgtcgtcccgtggcctacctctcgaagaaacttgacccagttgcaagtggttggcctgtctgcttgaaagctattgccgcagttgcaatcctcgtcaaagatgccgacaaacttactttgggccagaacattactgttggcgcaccacacgcccttgaaaacatcgttcgtcagccacctgatcgctggatgaccaatgctcgcatgacgcattatcagagcctcttgcttaccgaacgcgtgacttttgctccacctgcagccttaaaccccgcaacccttttacccgaagaaacagatgagcctgtgacgcatgactgtcaccagctcttgattgaagaaactggcgtacgcaaagacctcaccgatattccattaacaggtgaggtacttacgtggtttaccggcgggtcctcttatgtcgtcgaaggcaaacgtatggctggtgccgccgttgttgatggcacccgtactatctgggcaagcagcttacccgaaggcacgagtgctcagaaagcagagttgatggccttgacccaagccttacgccttgctgaagggaaatcgatcaatatttacaccgactcacgctatgcattcgccacggcacatgtacacggtgccatctacaaacaacgtggtttgttaacttctgctggccgcgagattaagaacaaagaagaaatcctttccttacttgaagccttacacctccccaaacgtctcgctattattcattgtccagggcatcagaaagcaaaagatcctatcagccgtgggaatcaaatggcagatcgtgtcgctaaacaggcagcccaaggcgttaacttgttgcccatgattgagacccctaaagctcca

SEQ ID NO: 170 - protein, 687 aa, synthetic construct
  REGION 1..687: note = Engineered reverse transcriptase variants
MHHHHHHGGSGVLTLQLDDEYRLYSPLVKPDQNIQFWLEQFPQAWAETAGMGLAKQVPPQVIQLKASATPVSVRQYPLSKEAQEGIRPHVQRLIQQGILVPVQSPWNTPLLPVRKPGTNDYRPVQDLREVNKRVQDIHPTVPNPYNLLCALPPQRSWYTVLDLKDAYFCLRLHPTSQPLFAFEWRDPDTGRTGQLTWTRLPQGFKNSPTIFDEALHRDLANFRIQHPQVTLLQYVDDLLLAGATKQDCLEGTKALLLELSNLGYRVSAKKAQICRREVTYLGYSLRDGQRWLTEARKKTVVQIPAPTTAKQMREFLGTAGFCRLWIPGFATLAAPLYPLTKEKGEFSWAPEHQKAFDAIKKALLSAPALALPDVTKPFTLYVDERKGVARGVLTQTLGPWRRPVAYLSKKLDPVASGWPVCLKAIAAVAILVKDADKLTLGQNITVGAPHALENIVRQPPDRWMTNARMTHYQSLLLTERVTFAPPAALNPATLLPEETDEPVTHDCHQLLIEETGVRKDLTDIPLTGEVLTWFTGGSSYVVEGKRMAGAAVVDGTRTIWASSLPEGTSAQKAELMALTQALRLAEGKSINIYTDSRYAFATAHVHGAIYKQRGLLTSAGREIKNKEEILSLLEALHLPKRLAIIHCPGHQKAKDPISRGNQMADRVAKQAAQGVNLLPMIETPKAP

SEQ ID NO: 171 - DNA, 2061 bp, synthetic construct
  misc_feature 1..2061: note = Engineered reverse transcriptase variants
  source 1..2061: mol_type = other DNA
atgcatcaccatcaccatcatggtggtagcggagtgctgacccttcagctggatgatgaatatcgcttgtacagtccgctggtcaaaccagaccaaaacattcagttctggctcgaacagtttccgcaagcgtgggctgaaactgctggcatgggcctggccaaacaggttcctcctcaggtaatccaattaaaggcatctgccacgccggtgtcagttcgtcagtatccgctgtcgaaagaagcgcaagaggggattcgcccacacgtgcagcgtttgatccagcagggcattctggtaccggttcaaagcccctggaataccccgcttttaccagtcaaaaaaccgggtacaaacgattaccgtcctgtgcaagacctgcgcgaagtcaataaacgtgtgcaggatatccacccaaccgttccgaacccgtataatctgttgtgcgcgttaccgccgcagcgttcctggtacacggtgctggacctgaaggacgcgttcttctgtcttcgcctcgcacccaccagccagccactgtttgcctttgaatggcgcgatcctgatacgggccgtactgggcaattaacatggacccgtttgccgcagggctttaagaacagtcccgcgctgtttgatgaggctcttcaccgcgacctcgcaaatttccgcatccaacacccacaggtaacgttactccagtatgtcgatgatcttttgttagcgggtgccaccaaacaggactgcttggaaggaacgaaagcacttctcttggaactctcggatttaggttatcgtgtgtccgccaagaaagctcagatttgtcgccgcgaagtgacatacttaggctattcattgcgtgatggtcaacgttggcttactgaggcgcgcaagaagaccgttgttcaaatccccgcccctacgaccgcgaaacagatgcgtgaatttcttggcacggcaggtttttgccgtttgtggattcctggctttgctacgttagcggcacccctctatccactcacgaaagagaaaggagaattctcttgggctccagaacatcagaaagcgtttgacgccatcaagaaagcgttattaagcgctcctgctcttgcattgcccgatgtcaccaaaccattcacgctctacgtggatgaacgcaaaggcgtagcccgcggtgtgttgacacagaccttaggaccttggcgtcgtcccgtggcctacctctcgaagaaacttgacccagttgcaagtggttggcctgtctgcttgaaagctattgccgcagttgcaatcctcgtcaaagatgccgacaaacttactttgggccagaacattactgttattgcaccacacgcccttgaaaacatcgttcgtcagccacctgatcgctggatgaccaatgctcgcatgacgcattatcagagcctcttgcttaccgaacgcgtgacttttgctccacctgcagccttaaaccccgcaacccttttacccgaagaaacagatgagcctgtgacgcatgactgtcaccagctcttgattgaagaaactggcgtacgcaaagacctcaccgatattccattaacaggtgaggtacttacgtggtttaccgacgggtcctcttatgtcgtcgaaggcaaacgtatggctggtgccgccgttgttgatggcacccgtactatctgggcaagcagcttacccgaaggcacgagtgctcagaaagcagagttgatggccttgacccaagccttacgccttgctgaagggaaatcgatcaatatttacaccgactcacgctatgcattcgccacggcacatgtacacggtgccatctacaaacaacgtggtttgttaacttctgctggccgcgagattaagaacaaagaagaaatcctttccttacttgaagccttacacctccccaaacgtctcgctattattcattgtccagggcatcagaaagcaaaagatcctatcagccgtgggaatcaaatggcagatcgtgtcgctaaacaggcagcccaaggcgttaacttgttgcccatgattgagacccctaaagctcca

SEQ ID NO: 172 - protein, 687 aa, synthetic construct
  REGION 1..687: note = Engineered reverse transcriptase variants
MHHHHHHGGSGVLTLQLDDEYRLYSPLVKPDQNIQFWLEQFPQAWAETAGMGLAKQVPPQVIQLKASATPVSVRQYPLSKEAQEGIRPHVQRLIQQGILVPVQSPWNTPLLPVKKPGTNDYRPVQDLREVNKRVQDIHPTVPNPYNLLCALPPQRSWYTVLDLKDAFFCLRLAPTSQPLFAFEWRDPDTGRTGQLTWTRLPQGFKNSPALFDEALHRDLANFRIQHPQVTLLQYVDDLLLAGATKQDCLEGTKALLLELSDLGYRVSAKKAQICRREVTYLGYSLRDGQRWLTEARKKTVVQIPAPTTAKQMREFLGTAGFCRLWIPGFATLAAPLYPLTKEKGEFSWAPEHQKAFDAIKKALLSAPALALPDVTKPFTLYVDERKGVARGVLTQTLGPWRRPVAYLSKKLDPVASGWPVCLKAIAAVAILVKDADKLTLGQNITVIAPHALENIVRQPPDRWMTNARMTHYQSLLLTERVTFAPPAALNPATLLPEETDEPVTHDCHQLLIEETGVRKDLTDIPLTGEVLTWFTDGSSYVVEGKRMAGAAVVDGTRTIWASSLPEGTSAQKAELMALTQALRLAEGKSINIYTDSRYAFATAHVHGAIYKQRGLLTSAGREIKNKEEILSLLEALHLPKRLAIIHCPGHQKAKDPISRGNQMADRVAKQAAQGVNLLPMIETPKAP

SEQ ID NO: 173 - DNA, 2061 bp, synthetic construct
  misc_feature 1..2061: note = Engineered reverse transcriptase variants
  source 1..2061: mol_type = other DNA
atgcatcaccatcaccatcatggtggtagcggagtgctgacccttcagctggatgatgaatatcgcttgtacagtccgctggtcaaaccagaccaaaacattcagttctggctcgaacagtttccgcaagcgtgggctgaaactgcaggcatgggcctggccaaacaggttcctcctcaggtaatccaattaaaggcatctgccacgccggtgtcagttcgtcagtatccgctgtcgaaagaagcgcaagaggggattcgcccacacgtgcagcgtttgatccagcagggcattctggtaccggttcaaagcccctggaataccccgcttttaccagtccgcaaaccgggtacaaacgattaccgtcctgtgcaagacctgcgcgaagtcaataaacgtgtgcaggatatccacccaaccgttccgaacccgtataatctgttgtgcgcgttaccgccgcagcgttcctggtacacggtgctggacctgaaggacgcgttcttctgtcttcgcctccatcccaccagccagccactgtttgcctttgaatggcgcgatcctgatacgggccgtactgggcaattaacatggacccgtttgccgcagggctttaagaacagtcccaccatttttgatgaggctcttcaccgcgacctcgcaaatttccgcatccaacacccacaggtaacgttactccagtatgtcgatgatcttttgttagcgggtgccaccaaacaggactgcttggaaggaacgaaagcacttctcttggaactctcggatttaggttatcgtgtgtccgccaagaaagctcagatttgtcgccgcgaagtgacatacttaggctattcattgcgtgatggtcaacgttggcttactgaggcgcgcaagaagaccgttgttcaaatccccgcccctaagaccccgaaacagatgcgtgaatttcttggcacggcaggtttctgccgtttgtggattcctggctttgctaccttagcggcacccctctatccactcacgaaagagaaaggagaattctcttgggccccagaacatcagaaagcgtttgacgccatcaagaaagcgttattaagcgctcctgctcttgcattgcccgatgtcaccaaaccattcacgctctacgtggatgaacgcaaaggcgtagcccgcggtgtgttgacacagaccttaggaccttggcgtcgtcccgtggcctacctctcgaagaaacttgacccagttgcaagtggttggcctgtctgcttgaaagctattgccgcagttgcaatcctcgtcaaagatgccgacaaacttactttgggccagaacattactgttattgcaccacacgcccttgaaaacatcgttcgtcagccacctgatcgctggatgaccaatgctcgcatgacgcattatcagagcctcttgcttaccgaacgcgtgacttttgctccacctgcagccttaaaccccgcaacccttttacccgaagaaacagatgagcctgtgacgcatgactgtcaccagctcttgattgaagaaactggcgtacgcaaagacctcaccgatattccattaacaggtgaggtacttacgtggtttaccgaggggtcctcttatgtcgtcgaaggcaaacgtatggctggtgccgccgttgttgatggcacccgtactatctgggcaagcagcttacccgaaggcacgagtgctcagaaagcagatttgatggccttgacccaagccttacgccttgctgaagggaaatcgatcaatatttacaccgactcacgcagcgcattcgccacggcacatgtacacggtgccatctacaaacaacgtggtttgttaacttctgctggccgcgagattaagaacaaagaagaaatcctttccttacttgaagccttacacctccccaaacgtctcgctattattcattgtccagggcatcagaaagcaaaagatcctatcagccgtgggaatcaaatggcagatcgtgtcgctaaacaggcagcccaaggcgttaacttgttgcccatgattgagacccctaaagctcca

SEQ ID NO: 174 - protein, 687 aa, synthetic construct
  REGION 1..687: note = Engineered reverse transcriptase variants
MHHHHHHGGSGVLTLQLDDEYRLYSPLVKPDQNIQFWLEQFPQAWAETAGMGLAKQVPPQVIQLKASATPVSVRQYPLSKEAQEGIRPHVQRLIQQGILVPVQSPWNTPLLPVRKPGTNDYRPVQDLREVNKRVQDIHPTVPNPYNLLCALPPQRSWYTVLDLKDAFFCLRLHPTSQPLFAFEWRDPDTGRTGQLTWTRLPQGFKNSPTIFDEALHRDLANFRIQHPQVTLLQYVDDLLLAGATKQDCLEGTKALLLELSDLGYRVSAKKAQICRREVTYLGYSLRDGQRWLTEARKKTVVQIPAPKTPKQMREFLGTAGFCRLWIPGFATLAAPLYPLTKEKGEFSWAPEHQKAFDAIKKALLSAPALALPDVTKPFTLYVDERKGVARGVLTQTLGPWRRPVAYLSKKLDPVASGWPVCLKAIAAVAILVKDADKLTLGQNITVIAPHALENIVRQPPDRWMTNARMTHYQSLLLTERVTFAPPAALNPATLLPEETDEPVTHDCHQLLIEETGVRKDLTDIPLTGEVLTWFTEGSSYVVEGKRMAGAAVVDGTRTIWASSLPEGTSAQKADLMALTQALRLAEGKSINIYTDSRSAFATAHVHGAIYKQRGLLTSAGREIKNKEEILSLLEALHLPKRLAIIHCPGHQKAKDPISRGNQMADRVAKQAAQGVNLLPMIETPKAP

SEQ ID NO: 175 - DNA, 2061 bp, synthetic construct
  misc_feature 1..2061: note = Engineered reverse transcriptase variants
  source 1..2061: mol_type = other DNA
atgcatcaccatcaccatcatggtggtagcggagtgctgacccttcagctggatgatgaatatcgcttgtacagtccgctggtcaaaccagaccaaaacattcagttctggctcgaacagtttccgcaagcgtgggctgaaactgcaggcatgggcctggccaaacaggttcctcctcaggtaatccaattaaaggcatctgccacgccggtgtcagttcgtcagtatccgctgtcgaaagaagcgcaagaggggattcgcccacacgtgcagcgtttgatccagcagggcattctggtaccgtgtcaaagcccctggaataccccgcttttaccagtccgcaaaccgggtacaaacgattaccgtcctgtgcaagacctgcgcgaagtcaataaacgtgtgcaggatatccacccaaccgttccgaacccgtataatctgttgtgcgcgttaccgccgcagcgttcctggtacacggtgctggacctgaaggacgcgttcttctgtcttcgcctccaccccaccagccagccactgtttgcctttgaatggcgcgatcctgatacgggccgtactgggcaattaacatggacccgtttgccgcagggctttaagaacagtcccaccatttttgatgaggctcttcaccgcgacctcgcaaatttccgcatccaacacccacaggtaacgttactccagtatgtcgatgatcttttgttagcgggtgccaccaaacaggactgcttggaaggaacgaaagcacttctcttggaactcggcgatttaggttatcgtgtgtccgccaagaaagctcagatttgtcgccgcgaagtgacatacttaggctattcattgcgtgatggtcaacgttggcttactgaggcgcgcaagaagaccgttgttcaaatccccgcccctaccaccgcgaaacagatgcgtgaatttcttggcacggcaggtttctgccgtttgtggattcctggctttgctaccttagcggcacccctctatccactcacgaaagagaaaggagaattctcttgggccccagaacatcagaaagcgtttgacgccatcaagaaagcgttattaagcgctcctgctcttgggttgcccgatgtcaccaaaccattcacgctctacgtggatgaacgcaaaggcgtagcccgcggtgtgttgacacagaccttaggaccttggcgtcgtcccgtggcctacctctcgaagaaacttgacccagttgcaagtggttggcctgtctgcttgaaagctattgccgcagttgcaatcctcgtcaaagatgccgacaaacttactttgggccagaacattactgttattgcaccacacgcccttgaaaacatcgttcgtcagccacctgatcgctggatgaccaatgctcgcatgacgcattatcagtcgctcttgcttaccgaacgcgtgacttttgctccacctgcagccttaaaccccgcaacccttttacccgaagaaacagatgagcctgtgacgcatgactgtcaccagctcttgattgaagaaactggcgtacgcaaagacctcaccgatattccattaacaggtgaggtacttacgtggtttaccgatgggtcctcttatgtcgtcgaaggcaaacgtatggctggtgccgccgttgttgatggcacccgtactatctgggcaagcagcttacccgaaggcacgagtgctcagaaagcagagttgattgccttgacccaagccttacgccttgctgaagggaaatcgatcaatatttacaccgactcacgctatgcattcgccacggcacatgtacacggtgccatctacaaacaacgtggtttgttaacttctgctggccgcgagattaagaacaaagaagaaatcctttccttacttgaagccttacacctccccaaacgtctcgctattattcattgtccagggcatcagaaagcaaaagatcctatcagccgtgggaatcaaatggcagatcgtgtcgctaaacaggcagcccaaggcgttaacttgttgcccatgattgagacccctaaagctcca

SEQ ID NO: 176 - protein, 687 aa, synthetic construct
  REGION 1..687: note = Engineered reverse transcriptase variants
MHHHHHHGGSGVLTLQLDDEYRLYSPLVKPDQNIQFWLEQFPQAWAETAGMGLAKQVPPQVIQLKASATPVSVRQYPLSKEAQEGIRPHVQRLIQQGILVPCQSPWNTPLLPVRKPGTNDYRPVQDLREVNKRVQDIHPTVPNPYNLLCALPPQRSWYTVLDLKDAFFCLRLHPTSQPLFAFEWRDPDTGRTGQLTWTRLPQGFKNSPTIFDEALHRDLANFRIQHPQVTLLQYVDDLLLAGATKQDCLEGTKALLLELGDLGYRVSAKKAQICRREVTYLGYSLRDGQRWLTEARKKTVVQIPAPTTAKQMREFLGTAGFCRLWIPGFATLAAPLYPLTKEKGEFSWAPEHQKAFDAIKKALLSAPALGLPDVTKPFTLYVDERKGVARGVLTQTLGPWRRPVAYLSKKLDPVASGWPVCLKAIAAVAILVKDADKLTLGQNITVIAPHALENIVRQPPDRWMTNARMTHYQSLLLTERVTFAPPAALNPATLLPEETDEPVTHDCHQLLIEETGVRKDLTDIPLTGEVLTWFTDGSSYVVEGKRMAGAAVVDGTRTIWASSLPEGTSAQKAELIALTQALRLAEGKSINIYTDSRYAFATAHVHGAIYKQRGLLTSAGREIKNKEEILSLLEALHLPKRLAIIHCPGHQKAKDPISRGNQMADRVAKQAAQGVNLLPMIETPKAP

SEQ ID NO: 177 - DNA, 2061 bp, synthetic construct
  misc_feature 1..2061: note = Engineered reverse transcriptase variants
  source 1..2061: mol_type = other DNA
atgcatcaccatcaccatcatggtggtagcggagtgctgacccttcagctggatgatgaatatcgcttgtacagtccgctggtcaaaccagaccaaaacattcagttctggctcgaacagtttccgcaagcgtgggctgaaactgctggcatgggcctggccaaacaggttcctcctcaggtaatccaattaaaggcatctgccacgccggtgtcagttcgtcagtatccgctgtcgaaagaagcgcaagaggggattcgcccacacgtgcagcgtttgatccagcagggcattctggtaccggttcaaagcccctggaataccccgcttttaccagtccgtaaaccgggtacaaacgattaccgtcctgtgcaagacctgcgcgaagtcaataaacgtgtgcaggatatccacccaaccgttccgaacccgtataatctgttgtgcgcgttaccgccgcagcgttcctggtacacggtgctggacctgaaggacgcgttcttctgtcttcgcctccaccccaccagccagccactgtttgcctttgaatggcgcgatcctgatacgggccgtactgggcaattaacatggacccgtttgccgcagggctttaagaacagtcccaccatttttgatgaggctcttcaccgcgacctcgcaaatttccgcatccaacacccacaggtaacgttactccagtatgtcgatgatcttttgttagcgggtgccaccaaacaggactgcttggaaggaacgaaagcacttctcttggaactctcggatttaggttatcgtgtgtccgccaagaaagctcagatttgtcgccgcgaagtgacatacttaggctattcattgcgtgatggtcaacgttggcttactgaggcgcgcaagaagaccgttgttcaaatccccgcccctacgaccgcgaaacagatgcgtgaatttcttggcacggcaggtttctgccgtttgtggattcctggctttgctaccttagcggcacccctctatccactcacgaaagagaaaggagaattctcttgggccccagaacatcagaaagcgtttgacgccatcaagaaagcgttattaagcgctcctgctcttgcattgcccgatgtcaccaaaccattcacgctctacgtggatgaacgcaaaggcgtagcccgcggtgtgttgacacagaccttaggaccttggcgtcgtcccgtggcctacctctcgaagaaacttgacccagttgcaagtggttggcctgtctgcttgaaagctattgccgcagttgcaatcctcgtcaaagatgccgacaaacttactttgggccagaacattactgttattgcaccacacgcccttgaaaacatcgttcgtcagccacctgatcgctggatgaccaatgctcgcatgacgcattatcagagcctcttgcttaccgaacgcgtgacttttgctccacctgcagccttaaaccccgcaacccttttacccgaagaaacagatgagcctgtgacgcatgactgtcaccagctcttgattgaagaaactggcgtacgcaaagacctcaccgatattccattaacaggtgaggtacttacgtggtttaccgacgggtcctcttatgtcgtcgaaggcaaacgtatggctggtgccgccgttgttgatggcacccgtactatctgggcaagcagcttacccgaaggcacgagtgctcagaaagcagatttgatggccttgacccaagccttacgccttgctgaagggaaatcgatcaatatttacaccgactcacgctatgcattcgccacggcacatgtacacggtgccatctacaaacaacgtggtttgttaacttctgctggccgcgagattaagaacaaagaagaaatcctttccttacttgaagccttacacctccccaaacgtctcgctattattcattgtccagggcatcagaaagcaaaagatcctatcagccgtgggaatcaaatggcagatcgtgtcgctaaacaggcagcccaaggcgttaacttgttgcccatgattgagacccctaaagctcca

SEQ ID NO: 178 - protein, 687 aa, synthetic construct
  REGION 1..687: note = Engineered reverse transcriptase variants
MHHHHHHGGSGVLTLQLDDEYRLYSPLVKPDQNIQFWLEQFPQAWAETAGMGLAKQVPPQVIQLKASATPVSVRQYPLSKEAQEGIRPHVQRLIQQGILVPVQSPWNTPLLPVRKPGTNDYRPVQDLREVNKRVQDIHPTVPNPYNLLCALPPQRSWYTVLDLKDAFFCLRLHPTSQPLFAFEWRDPDTGRTGQLTWTRLPQGFKNSPTIFDEALHRDLANFRIQHPQVTLLQYVDDLLLAGATKQDCLEGTKALLLELSDLGYRVSAKKAQICRREVTYLGYSLRDGQRWLTEARKKTVVQIPAPTTAKQMREFLGTAGFCRLWIPGFATLAAPLYPLTKEKGEFSWAPEHQKAFDAIKKALLSAPALALPDVTKPFTLYVDERKGVARGVLTQTLGPWRRPVAYLSKKLDPVASGWPVCLKAIAAVAILVKDADKLTLGQNITVIAPHALENIVRQPPDRWMTNARMTHYQSLLLTERVTFAPPAALNPATLLPEETDEPVTHDCHQLLIEETGVRKDLTDIPLTGEVLTWFTDGSSYVVEGKRMAGAAVVDGTRTIWASSLPEGTSAQKADLMALTQALRLAEGKSINIYTDSRYAFATAHVHGAIYKQRGLLTSAGREIKNKEEILSLLEALHLPKRLAIIHCPGHQKAKDPISRGNQMADRVAKQAAQGVNLLPMIETPKAP

SEQ ID NO: 179 - DNA, 2061 bp, synthetic construct
  misc_feature 1..2061: note = Engineered reverse transcriptase variants
  source 1..2061: mol_type = other DNA
atgcatcaccatcaccatcatggtggtagcggagtgctgacccttcagctggatgatgaatatcgcttgtacagtccgctggtcaaaccagaccaaaacattcagttctggctcgaacagtttccgcaagcgtgggctgaaactgctggcatgggcctggccaaacaggttcctcctcaggtaatccaattaaaggcatctgccacgccggtgtcagttcgtcagtatccgctgtcgaaagaagcgcaagaggggattcgcccacacgtgcagcgtttgatccagcagggcattctggtaccggttcaaagcccctggaataccccgcttttaccagtccgcaaaccgggtacaaacgattaccgtcctgtgcaagacctgcgcgaagtcaataaacgtgtgcaggatatccacccaaccgttccgaacccgtataatctgttgtgcgcgttaccgccgcagcgttcctggtacacggtgctggacctgaaggacgcgttcttctgtcttcgcctcgcacccaccagccagccactgtttgcctttgaatggcgcgatcctgatacgggccgtactgggcaattaacatggacccgtttgccgcagggctttaagaacagtcccgcgctgtttgatgaggctcttcaccgcgacctcgcaaatttccgcatccaacacccacaggtaacgttactccagtatgtcgatgatcttttgttagcgggtgccaccaaacaggactgcttggaaggaacgaaagcacttctcttggaactctcggatttaggttatcgtgtgtccgccaagaaagctcagatttgtcgccgcgaagtgacatacttaggctattcattgcgtgatggtcaacgttggcttactgaggcgcgcaagaagaccgttgttcaaatccccgcccctaagaccgcgaaacagatgcgtgaatttcttggcacggcaggtttctgccgtttgtggattcctggctttgctacgttagcggcacccctctatccactcacgaaagagaaaggagaattctcttgggccccagaacatcagaaagcgtttgacgccatcaagaaagcgttattaagcgctcctgctcttgcattgcccgatgtcaccaaaccattcacgctctacgtggatgaacgcaaaggcgtagcccgcggtgtgttgacacagaccttaggaccttggcgtcgtcccgtggcctacctctcgaagaaacttgacccagttgcaagtggttggcctgtctgcttgaaagctattgccgcagttgcaatcctcgtcaaagatgccgacaaacttactttgggccagaacattactgttattgcaccacacgcccttgaaaacatcgttcgtcagccacctgatcgctggatgaccaatgctcgcatgacgcattatcagagcctcttgcttaccgaacgcgtgacttttgctccacctgcagccttaaaccccgcaacccttttacccgaagaaacagatgagcctgtgacgcatgactgtcaccagctcttgattgaagaaactggcgtacgcaaagacctcaccgatattccattaacaggtgaggtacttacgtggtttaccgaggggtcctcttatgtcgtcgaaggcaaacgtatggctggtgccgccgttgttgatggcacccgtactatctgggcaagcagcttacccgaaggcacgagtgctcagaaagcagagttgatggccttgacccaagccttacgccttgctgaagggaaatcgatcaatatttacaccgactcacgctatgcattcgccacggcacatgtacacggtgccatctacaaacaacgtggtttgttaacttctgctggccgcgagattaagaacaaagaagaaatcctttccttacttgaagccttacacctccccaaacgtctcgctattattcattgtccagggcatcagaaagcaaaagatcctatcagccgtgggaatcaaatggcagatcgtgtcgctaaacaggcagcccaaggcgttaacttgttgcccatgattgagacccctaaagctcca

SEQ ID NO: 180 - protein, 687 aa, synthetic construct
  REGION 1..687: note = Engineered reverse transcriptase variants
MHHHHHHGGSGVLTLQLDDEYRLYSPLVKPDQNIQFWLEQFPQAWAETAGMGLAKQVPPQVIQLKASATPVSVRQYPLSKEAQEGIRPHVQRLIQQGILVPVQSPWNTPLLPVRKPGTNDYRPVQDLREVNKRVQDIHPTVPNPYNLLCALPPQRSWYTVLDLKDAFFCLRLAPTSQPLFAFEWRDPDTGRTGQLTWTRLPQGFKNSPALFDEALHRDLANFRIQHPQVTLLQYVDDLLLAGATKQDCLEGTKALLLELSDLGYRVSAKKAQICRREVTYLGYSLRDGQRWLTEARKKTVVQIPAPKTAKQMREFLGTAGFCRLWIPGFATLAAPLYPLTKEKGEFSWAPEHQKAFDAIKKALLSAPALALPDVTKPFTLYVDERKGVARGVLTQTLGPWRRPVAYLSKKLDPVASGWPVCLKAIAAVAILVKDADKLTLGQNITVIAPHALENIVRQPPDRWMTNARMTHYQSLLLTERVTFAPPAALNPATLLPEETDEPVTHDCHQLLIEETGVRKDLTDIPLTGEVLTWFTEGSSYVVEGKRMAGAAVVDGTRTIWASSLPEGTSAQKAELMALTQALRLAEGKSINIYTDSRYAFATAHVHGAIYKQRGLLTSAGREIKNKEEILSLLEALHLPKRLAIIHCPGHQKAKDPISRGNQMADRVAKQAAQGVNLLPMIETPKAP

SEQ ID NO: 181 - DNA, 2061 bp, synthetic construct
  misc_feature 1..2061: note = Engineered reverse transcriptase variants
  source 1..2061: mol_type = other DNA
atgcatcaccatcaccatcatggtggtagcggagtgctgacccttcagctggatgatgaatatcgcttgtacagtccgctggtcaaaccagaccaaaacattcagttctggctcgaacagtttccgcaagcgtgggctgaaactgctggcatgggcctggccaaacaggttcctcctcaggtaatccagttaaaggcatctgccacgccggtgtcagttcgtcagtatccgctgtcgaaagaagcgcaagaggggattcgcccacacgttcagcgtttgatccagcagggcattctggtaccggttcaaagcccctggaataccccgcttttaccagtccgtaaaccgggtacaaacgattaccgtcctgtgcaagacctgcgcgaagtcaataaacgtgtgcaggatatccacccaaccgttccgaacccgtataatctgttgtgcgcgttaccgccgcagcgttcctggtacacggtgctggacctgaaggacgcgttcttctgtcttcgcctccaccccaccagccagccactgtttgcctttgaatggcgcgatcctgatacgggccgtactgggcaattaacatggacccgtttgccgcagggctttaagaacagtcccaccatttttgatgaggctcttcgtcgcgacctcgcaaatttccgcatccaacacccacaggtaacgttactccagtatgtcgatgatcttttgttagcgggtgccaccaaacaggactgcttggaaggaacgaaagcacttctcttggaactctcggatttaggttatcgtgtgtccgccaagaaagctcagatttgtcgccgcgaagtgacatacttaggctattcattgcgtgatggtcaacgttggcttactgaggcgcgcaagaagaccgttgttcaaatccccgcccctacgaccccgaaacagatgcgtgaatttcttggcacggcaggtttctgccgtttgtggattcctggctttgctacgttagcggcacccctctatccactcacgaaagagaaaggagaattctcttgggccccagaacatcagaaagcgtttgacgccatcaagaaagcgttattaagcgctcctgctcttgcattgcccgatgtcaccaaaccattcacgctctacgtggatgaacgcaaaggcgtagcccgcggtgtgttgacacagaccttaggaccttggcgtcgtcccgtggcctacctctcgaagaaacttgacccagttgcaagtggttggcctgtctgcttgaaagctattgccgcagttgcaatcctcgtcaaagatgccgacaaacttactttgggccagaacattactgttattgcaccacacgcccttgaaaacatcgttcgtcagccacctgatcgctggatgaccaatgctcgcatgacgcattatcagagcctcttgcttaccgaacgcgtgacttttgctccacctgcagccttaaaccccgcaacccttttacccgaagaaacagatgagcctgtgacgcatgactgtcaccagctcttgattgaagaaactggcgtacgcaaagacctcaccgatattccattaacaggtgaggtacttacgtggtttaccgaggggtcctcttatgtcgtcgaaggcaaacgtatggctggtgccgccgttgttgatggcacccgtactatctgggcaagcagcttacccgaaggcacgagtgctcagaaagcagagttgatggccttgacccaagccttacgccttgctgaagggaaatcgatcaatatttacaccgactcacgctatgcattcgccacggcacatgtacacggtgccatctacaaacaacgtggtttgttaacttctgctggccgcgagattaagaacaaagaagaaatcctttccttacttgaagccttacacctccccaaacgtctcgctattattcattgtccagggcatcagaaagcaaaagatcctatcagccgtgggaatcaaatggcagatcgtgtcgctaaacaggcagcccaaggcgttaacttgttgcccatgattgagacccctaaagctcca

SEQ ID NO: 182 - protein, 687 aa, synthetic construct
  REGION 1..687: note = Engineered reverse transcriptase variants
MHHHHHHGGSGVLTLQLDDEYRLYSPLVKPDQNIQFWLEQFPQAWAETAGMGLAKQVPPQVIQLKASATPVSVRQYPLSKEAQEGIRPHVQRLIQQGILVPVQSPWNTPLLPVRKPGTNDYRPVQDLREVNKRVQDIHPTVPNPYNLLCALPPQRSWYTVLDLKDAFFCLRLHPTSQPLFAFEWRDPDTGRTGQLTWTRLPQGFKNSPTIFDEALRRDLANFRIQHPQVTLLQYVDDLLLAGATKQDCLEGTKALLLELSDLGYRVSAKKAQICRREVTYLGYSLRDGQRWLTEARKKTVVQIPAPTTPKQMREFLGTAGFCRLWIPGFATLAAPLYPLTKEKGEFSWAPEHQKAFDAIKKALLSAPALALPDVTKPFTLYVDERKGVARGVLTQTLGPWRRPVAYLSKKLDPVASGWPVCLKAIAAVAILVKDADKLTLGQNITVIAPHALENIVRQPPDRWMTNARMTHYQSLLLTERVTFAPPAALNPATLLPEETDEPVTHDCHQLLIEETGVRKDLTDIPLTGEVLTWFTEGSSYVVEGKRMAGAAVVDGTRTIWASSLPEGTSAQKAELMALTQALRLAEGKSINIYTDSRYAFATAHVHGAIYKQRGLLTSAGREIKNKEEILSLLEALHLPKRLAIIHCPGHQKAKDPISRGNQMADRVAKQAAQGVNLLPMIETPKAP

SEQ ID NO: 183 - DNA, 2061 bp, synthetic construct
  misc_feature 1..2061: note = Engineered reverse transcriptase variants
  source 1..2061: mol_type = other DNA
atgcatcaccatcaccatcatggtggtagcggagtgctgacccttcagctggatgatgaatatcgcttgtacagtccgctggtcaaaccagaccaaaacattcagttctggctcgaacagtttccgcaagcgtgggctgaaactgctggcatgggcctggccaaacaggttcctcctcaggtaatccaattaaaggcatctgccacgccggtgtcagttcgtcagtatccgctgtcgaaagaagcgcaagaggggattcgcccacacgtgcagcgtttgatccagcagggcattctggtaccggttcaaagcccctggaataccccgcttttaccagtccgcaaaccgggtacaaacgattaccgtcctgtgcaagacctgcgcgaagtcaataaacgtgtgcaggatatccacccaaccgttccgaacccgtataatctgttgtgcgcgttaccgccgcagcgttcctggtacacggtgctggacctgaaggacgcgttcttctgtcttcgcctccatcccaccagccagccactgtttgcctttgaatggcgcgatcctgatacgggccgtactgggcaattaacatggacccgtttgccgcagggctttaagaacagtcccaccatttttgatgaggctcttcaccgcgacctcgcaaatttccgcatccaacacccacaggtaacgttactccagtatgtcgatgatcttttgttagcgggtgccaccaaacaggactgcttggaaggaacgaaagcacttctcttggaactctcggatttaggttatcgtgtgtccgccaagaaagctcagatttgtcgccgcgaagtgacatacttaggctattcattgcgtgatggtcaacgttggcttactgaggcgcgcaagaagaccgttgttcaaatccccgcccctacgaccgcgaaacagatgcgtgaatttcttggcacggcaggtttctgccgtttgtggattcctggctttgctacgttagcggcacccctctatccactcacgaaagagaaaggagaattctcttggggtccagaacatcagaaagcgtttgacgccatcaagaaagcgttattaagcgctcctgctcttgcattgcccgatgtcaccaaaccattcacgctctacgtggatgaacgcaaaggcgtagcccgcggtgtgttgacacagaccttaggaccttggcgtcgtcccgtggcctacctctcgaagaaacttgacccagttgcaagtggttggcctgtctgcttgaaagctattgccgcagttgcaatcctcgtcaaagatgccgacaaacttactttgggccagaacattactgttattgcaccacacgcccttgaaaacatcgttcgtcagccacctgatcgctggatgaccaatgctcgcatgacgcattatcagagcctcttgcttaccgaacgcgtgacttttgctccacctgcagccttaaaccccgcaacccttttacccgaagaaacagatgagcctgtgacgcatgactgtcaccagctcttgattgaagaaactggcgtacgcaaagacctcaccgatattccattaacaggtgaggtacttacgtggtttaccgatgggtcctcttatgtcgtcgaaggcaaacgtatggctggtgccgccgttgttgatggcacccgtactatctgggcaagcagcttacccgaaggcacgagtgctcagaaagcagagttgatggccttgacccaagccttacgccttgctgaagggaaatcgatcaatatttacaccgactcacgctatgcattcgccacggcacatgtacacggtgccatctacaaacaacgtggtttgttaacttctgctggccgcgagattaagaacaaagaagaaatcctttccttacttgaagccttacacctccccaaacgtctcgctattattcattgtccagggcatcagaaagcaaaagatcctatcagccgtgggaatcaaatggcagatcgtgtcgctaaacaggcagcccaaggcgttaacttgttgcccatgattgagacccctaaagctcca

SEQ ID NO: 184 - protein, 687 aa, synthetic construct
  REGION 1..687: note = Engineered reverse transcriptase variants
MHHHHHHGGSGVLTLQLDDEYRLYSPLVKPDQNIQFWLEQFPQAWAETAGMGLAKQVPPQVIQLKASATPVSVRQYPLSKEAQEGIRPHVQRLIQQGILVPVQSPWNTPLLPVRKPGTNDYRPVQDLREVNKRVQDIHPTVPNPYNLLCALPPQRSWYTVLDLKDAFFCLRLHPTSQPLFAFEWRDPDTGRTGQLTWTRLPQGFKNSPTIFDEALHRDLANFRIQHPQVTLLQYVDDLLLAGATKQDCLEGTKALLLELSDLGYRVSAKKAQICRREVTYLGYSLRDGQRWLTEARKKTVVQIPAPTTAKQMREFLGTAGFCRLWIPGFATLAAPLYPLTKEKGEFSWGPEHQKAFDAIKKALLSAPALALPDVTKPFTLYVDERKGVARGVLTQTLGPWRRPVAYLSKKLDPVASGWPVCLKAIAAVAILVKDADKLTLGQNITVIAPHALENIVRQPPDRWMTNARMTHYQSLLLTERVTFAPPAALNPATLLPEETDEPVTHDCHQLLIEETGVRKDLTDIPLTGEVLTWFTDGSSYVVEGKRMAGAAVVDGTRTIWASSLPEGTSAQKAELMALTQALRLAEGKSINIYTDSRYAFATAHVHGAIYKQRGLLTSAGREIKNKEEILSLLEALHLPKRLAIIHCPGHQKAKDPISRGNQMADRVAKQAAQGVNLLPMIETPKAP

SEQ ID NO: 185 - DNA, 2061 bp, synthetic construct
  misc_feature 1..2061: note = Engineered reverse transcriptase variants
  source 1..2061: mol_type = other DNA
atgcatcaccatcaccatcatggtggtagcggagtgctgacccttcagctggatgatgaatatcgcttgtacagtccgctggtcaaaccagaccaaaacattcagttctggctcgaacagtttccgcaagcgtgggctgaaactgcaggcatgggcctggccaaacaggttcctcctcaggtaatccaattaaaggcatctgccacgccggtgtcagttcgtcagtatccgctgtcgaaagaagcgcaagaggggattcgcccacacgtgcagcgtttgatccagcagggcattctggtaccggttcaaagcccctggaataccccgcttttaccagtccgcaaaccgggtacaaacgattaccgtcctgtgcaagacctgcgcgaagtcaataaacgtgtgcaggatatccacccaaccgttccgaacccgtataatctgttgtgcgcgttaccgccgcagcgttcctggtacacggtgctggacctgaaggacgcgttcttctgtcttcgcctccaccccaccagccagccactgtttgcctttgaatggcgcgatcctgatacgggccgtactgggcaattaacatggacccgtttgccgcagggctttaagaacagtcccaccatttttgacgaggctcttcaccgcgacctcgcaaatttccgcatccaacacccacaggtaacgttactccagtatgtcgatgatcttttgttagcgggtgccaccaaacaggactgcttggaaggaacgaaagcacttctcttggaactctcggatttaggttatcgtgtgtccgccaagaaagctcagatttgtcgccgcgaagtgacatacttaggctattcattgcgtgatggtcaacgttggcttactgaggcgcgcaagaagaccgttgttcaaatccccgcccctaccaccgcgaaacagatgcgtgaatttcttggcacggcaggtttctgccgtttgtggattcctggctttgctaccctggcggcacccctctatccactcacgaaagagaaaggagaattctcttgggccccagaacatcagaaagcgtttgacgccatcaagaaagcgttattaagcgctcctgctcttgcattgcccgatgtcaccaaaccattcacgctctacgtggatgaacgcaaaggcgtagcccgcggtgtgttgacacagaccttaggaccttggcgtcgtcccgtggcctacctctcgaagaaacttgacccagttgcaagtggttggcctgtctgcttgaaagctattgccgcagttgcaatcctcgtcaaagatgccgacaaacttactttgggccagaacattactgttctggcaccacacgcccttgaaaacatcgttcgtcagccacctgatcgctggatgaccaatgctcgcatgacgcattatcagagcctcttgcttaccgaacgcgtgacttttgctccacctgcagccttaaaccccgcaacccttttacccgaagaaacagatgagcctgtgacgcatgactgtcaccagctcttgattgaagaaactggcgtacgcaaagacctcaccgatattccattaacaggtgaggtacttacgtggtttaccgccgggtcctcttatgtcgtcgaaggcaaacgtatggctggtgccgccgttgttgatggcacccgtactatctgggcaagcagcttacccgaaggcacgagtgctcagaaagcagagttgatggccttgacccaagccttacgccttgctgaagggaaatcgatcaatatttacaccgactcacgctatgcattcgccacggcacatgtacaaggtgccatctacaaacaacgtggtttgttaacttctgctggccgcgagattaagaacaaagaagaaatcctttccttacttgaagccttacacctccccaaacgtctcgctattattcattgtccagggcatcagaaagcaaaagatcctatcagccgtgggaatcaaatggcagatcgtgtcgctaaacaggcagcccaaggcgttaacttgttgcccatgattgagacccctaaagctcca

SEQ ID NO: 186 - protein, 687 aa, synthetic construct
  REGION 1..687: note = Engineered reverse transcriptase variants
MHHHHHHGGSGVLTLQLDDEYRLYSPLVKPDQNIQFWLEQFPQAWAETAGMGLAKQVPPQVIQLKASATPVSVRQYPLSKEAQEGIRPHVQRLIQQGILVPVQSPWNTPLLPVRKPGTNDYRPVQDLREVNKRVQDIHPTVPNPYNLLCALPPQRSWYTVLDLKDAFFCLRLHPTSQPLFAFEWRDPDTGRTGQLTWTRLPQGFKNSPTIFDEALHRDLANFRIQHPQVTLLQYVDDLLLAGATKQDCLEGTKALLLELSDLGYRVSAKKAQICRREVTYLGYSLRDGQRWLTEARKKTVVQIPAPTTAKQMREFLGTAGFCRLWIPGFATLAAPLYPLTKEKGEFSWAPEHQKAFDAIKKALLSAPALALPDVTKPFTLYVDERKGVARGVLTQTLGPWRRPVAYLSKKLDPVASGWPVCLKAIAAVAILVKDADKLTLGQNITVLAPHALENIVRQPPDRWMTNARMTHYQSLLLTERVTFAPPAALNPATLLPEETDEPVTHDCHQLLIEETGVRKDLTDIPLTGEVLTWFTAGSSYVVEGKRMAGAAVVDGTRTIWASSLPEGTSAQKAELMALTQALRLAEGKSINIYTDSRYAFATAHVQGAIYKQRGLLTSAGREIKNKEEILSLLEALHLPKRLAIIHCPGHQKAKDPISRGNQMADRVAKQAAQGVNLLPMIETPKAP

SEQ ID NO: 187 - DNA, 2061 bp, synthetic construct
  misc_feature 1..2061: note = Engineered reverse transcriptase variants
  source 1..2061: mol_type = other DNA
atgcatcaccatcaccatcatggtggtagcggagtgctgacccttcagctggatgatgaatatcgcttgtacagtccgctggtcaaaccagaccaaaacattcagttctggctcgaacagtttccgcaagcgtgggctgaaactgctggcatgggcctggccaaacaggttcctcctcaggtaatccaattaaaggcatctgccacgccggtgtcagttcgtcagtatccgctgtcgaaagaagcgcaagaggggattcgcccacacgtgcagcgtttgatccagcagggcattctggtaccggttcaaagcccctggaataccccgcttttaccagtccgcaaaccgggtacaaacgattaccgtcctgtgcaagacctgcgcgaagtcaataaacgtgtgcaggatatccacccaaccgttccgaacccgtataatctgttgtgcgcgttaccgccgcagcgttcctggtacacggtgctggacctgaaggacgcgttcttctgtcttcgcctccaccccaccagccagccactgtttgcctttgaatggcgcgatcctgatacgggccgtactgggcaattaacatggacccgtttgccgcagggctttaagaacagtcccaccatttttgatgaggctcttcaccgcgacctcgcaaatttccgcatccaacacccacaggtaacgttactccagtatgtcgatgatcttttgttagcgggtgccaccaaacaggactgcttggaaggaacgaaagcacttctcttggaactctcggatttaggttatcgtgtgtccgccaagaaagctcagatttgtcgccgcgaagtgacatacttaggctattcattgcgtgatggtcaacgttggcttactgaggcgcgcaagaagaccgttgttcaaatccccgcccctaccaccgcgcgtcagatgcgtgaatttcttggcacggcaggtttctgccgtttgtggattcctggctttgctaccttagcggcacccctctatccactcacgaaagagaaaggagaattctcttgggccccagaacatcagaaagcgtttgacgccatcaagaaagcgttattaagcgctcctgctcttgcattgcccgatgtcaccaaaccattcacgctctacgtggatgaacgcaaaggcgtagcccgcggtgtgttgacacagaccttaggaccttggcgtcgtcccgtggcctacctctcgaagaaacttgacccagttgcaagtggttggcctgtctgcttgaaagctattgccgcagttgcaatcctcgtcaaagatgccgacaaacttactttgggccagaacattactgttattgcaccacacgcccttgaagcaatcgttcgtcagccacctgatcgctggatgaccaatgctcgcatgacgcattatcagagcctcttgcttaccgatcgcgtgacttttgctccacctgcagccttaaaccccgcaacccttttacccgaagaaacagatgagcctgtgacgcatgactgtcaccagctcttgattgaagaaactggcgtacgcccggacctcaccgatattccattaacaggtgaggtacttacgtggtttaccgatgggtcctcttatgtcgtcgaaggcaaacgtatggctggtgccgccgttgttgatggcacccgtactatctgggcaagcagcttacccgaaggcacgagtgctcagaaagcagagttgatggccttgacccaagccttacgccttgctgaagggaaatcgatcaatatttacaccgactcacgctatgcattcgccacggcacatgtacacggtgccatctacaaacaacgtggtttgttaacttctgctggccgcgagattaagaacaaagaagaaatcctttccttacttgaagccttacacctccccaaacgtctcgctattattcattgtccagggcatcagaaagcaaaagatcctatcagccgtgggaatcgtatggcagatcgtgtcgctaaacaggcagcccaaggcgttaacttgttgcccatgattgagacccctaaagctcca

SEQ ID NO: 188 - protein, 687 aa, synthetic construct
  REGION 1..687: note = Engineered reverse transcriptase variants
MHHHHHHGGSGVLTLQLDDEYRLYSPLVKPDQNIQFWLEQFPQAWAETAGMGLAKQVPPQVIQLKASATPVSVRQYPLSKEAQEGIRPHVQRLIQQGILVPVQSPWNTPLLPVRKPGTNDYRPVQDLREVNKRVQDIHPTVPNPYNLLCALPPQRSWYTVLDLKDAFFCLRLHPTSQPLFAFEWRDPDTGRTGQLTWTRLPQGFKNSPTIFDEALHRDLANFRIQHPQVTLLQYVDDLLLAGATKQDCLEGTKALLLELSDLGYRVSAKKAQICRREVTYLGYSLRDGQRWLTEARKKTVVQIPAPTTARQMREFLGTAGFCRLWIPGFATLAAPLYPLTKEKGEFSWAPEHQKAFDAIKKALLSAPALALPDVTKPFTLYVDERKGVARGVLTQTLGPWRRPVAYLSKKLDPVASGWPVCLKAIAAVAILVKDADKLTLGQNITVIAPHALEAIVRQPPDRWMTNARMTHYQSLLLTDRVTFAPPAALNPATLLPEETDEPVTHDCHQLLIEETGVRPDLTDIPLTGEVLTWFTDGSSYVVEGKRMAGAAVVDGTRTIWASSLPEGTSAQKAELMALTQALRLAEGKSINIYTDSRYAFATAHVHGAIYKQRGLLTSAGREIKNKEEILSLLEALHLPKRLAIIHCPGHQKAKDPISRGNRMADRVAKQAAQGVNLLPMIETPKAP

SEQ ID NO: 189 - DNA, 2061 bp, synthetic construct
  misc_feature 1..2061: note = Engineered reverse transcriptase variants
  source 1..2061: mol_type = other DNA
atgcatcaccatcaccatcatggtggtagcggagtgctgacccttcagctggatgatgaatatcgcttgtacagtccgctggtcaaaccagaccaaaacattcagttctggctcgaacagtttccgcaagcgtgggctgaaactggtggcatgggcctggccaaacaggttcctcctcaggtaatccagttaaaggcatctgccacgccggtgtcagttcgtcagtatccgctgtcgaaagaagcgcaagaggggattcgcccacacattcagcgtttgatccagcagggcattctggtaccggttcaaagcccctggaataccccgcttttaccagtccgcaaaccgggtacaaacgattaccgtcctgtgcaagacctgcgcgaagtcaataaacgtgtgcaggatatccacccaaccgttccgaacccgtataatctgttgtgcgcgttaccgccgcagcgttcctggtacacggtgctggacctgaaggacgcgttcttctgtcttcgcctccatcccaccagccagccactgtttgcctttgaatggcgcgatcctgatacgggccgtactgggcaattaacatggacccgtttgccgcagggctttaagaacagtcccgcgatctttgatgaggctcttcaccgcgacctcgcaaatttccgcatccaacacccacaggtaacgttactccagtatgtcgatgatcttttgttagcgggtgccaccaaacaggactgcttggaaggaacgaaagcacttctcttggaactctcggatttaggttatcgtgtgtccgccaagaaagctcagatttgtcgccgcgaagtgacatacttaggctattcattgcgtgatggtcaacgttggcttactgaggcgcgcaagaagaccgttgttcaaatccccgcccctacgaccgcgaaacagatgcgtgaatttcttggcacggcaggtttttgccgtttgtggattcctggctttgctaccttagcggcacccctctatccactcacgaaagagaaaggagaattctcttgggccccagaacatcagaaagcgtttgacgccatcaagaaagcgttattaagcgctcctgctcttgcattgcccgatgtcaccaaaccattcacgctctacgtggatgaacgcaaaggcgtagcccgcggtgtgttgacacagaccttaggaccttggcgtcgtcccgtggcctacctctcgaagaaacttgacccagttgcaagtggttggcctgtctgcttgaaagctattgccgcagttgcaatcctcgtcaaagatgccgacaaacttactttgggccagaacattactgttattgcaccacacgcccttgaaaacatcgttcgtcagccacctgatcgctggatgaccaatgctcgcatgacgcattatcagagcctcttgcttaccgaacgcgtgacttttgctccacctgcagccttaaaccccgcaacccttttacccgaagaaacagatgagcctgtgacgcatgactgtcaccagctcttgattgaagaaactggcgtacgcaaagacctcaccgatattccattaacaggtgaggtacttacgtggtttaccgacgggtcctcttatgtcgtcgaaggcaaacgtatggctggtgccgccgttgttgatggcacccgtactatctgggcaagcagcttacccgaaggcacgagtgctcagaaagcagagttgatggccttgacccaagccttacgccttgctgaagggaaatcgatcaatatttacaccgactcacgcagcgcattcgccacggcacatgtacacggtgccatctacaaacaacgtggtttgttaacttctgctggccgcgagattaagaacaaagaagaaatcctttccttacttgaagccttacacctccccaaacgtctcgctattattcattgtccagggcatcagaaagcaaaagatcctatcagccgtgggaatcaaatggcagatcgtgtcgctaaacaggcagcccaaggcgttaacttgttgcccatgattgagacccctaaagctcca

SEQ ID NO: 190 - protein, 687 aa, synthetic construct
  REGION 1..687: note = Engineered reverse transcriptase variants
MHHHHHHGGSGVLTLQLDDEYRLYSPLVKPDQNIQFWLEQFPQAWAETGGMGLAKQVPPQVIQLKASATPVSVRQYPLSKEAQEGIRPHIQRLIQQGILVPVQSPWNTPLLPVRKPGTNDYRPVQDLREVNKRVQDIHPTVPNPYNLLCALPPQRSWYTVLDLKDAFFCLRLHPTSQPLFAFEWRDPDTGRTGQLTWTRLPQGFKNSPAIFDEALHRDLANFRIQHPQVTLLQYVDDLLLAGATKQDCLEGTKALLLELSDLGYRVSAKKAQICRREVTYLGYSLRDGQRWLTEARKKTVVQIPAPTTAKQMREFLGTAGFCRLWIPGFATLAAPLYPLTKEKGEFSWAPEHQKAFDAIKKALLSAPALALPDVTKPFTLYVDERKGVARGVLTQTLGPWRRPVAYLSKKLDPVASGWPVCLKAIAAVAILVKDADKLTLGQNITVIAPHALENIVRQPPDRWMTNARMTHYQSLLLTERVTFAPPAALNPATLLPEETDEPVTHDCHQLLIEETGVRKDLTDIPLTGEVLTWFTDGSSYVVEGKRMAGAAVVDGTRTIWASSLPEGTSAQKAELMALTQALRLAEGKSINIYTDSRSAFATAHVHGAIYKQRGLLTSAGREIKNKEEILSLLEALHLPKRLAIIHCPGHQKAKDPISRGNQMADRVAKQAAQGVNLLPMIETPKAP

SEQ ID NO: 191 - DNA, 2061 bp, synthetic construct
  misc_feature 1..2061: note = Engineered reverse transcriptase variants
  source 1..2061: mol_type = other DNA
atgcatcaccatcaccatcatggtggtagcggagtgctgacccttcagctggatgatgaatatcgcttgtacagtccgctggtcaaaccagaccaaaacattcagttctggctcgaacagtttccgcaagcgtgggctgaaactgcaggcatgggcctggccaaacaggttcctcctcaggtaatccaattaaaggcatctgccacgccggtgtcagttcgtcagtatccgctgtcgaaagaagcgcaagaggggattcgcccacacgtgcagcgtttgatccagcagggcattctggtaccggttcaaagcccctggaataccccgcttttaccagtccgcaaaccgggtacaaacgattaccgtcctgtgcaagacctgcgcgaagtcaataaacgtgtgcaggatatccacccaaccgttccgaacccgtataatctgttgtgcgcgttaccgccgcagcgttcctggtacacggtgctggacctgaaggacgcgttcttctgtcttcgcctccaccccaccagccagccactgtttgcctttgaatggcgcgatcctgatacgggccgtactgggcaattaacatggacccgtttgccgcagggctttaagaacagtcccaccatttttgatgaggctcttcaccgcgacctcgcaaatttccgcatccaacacccacaggtaacgttactccagtatgtcgatgatcttttgttagcgggtgccaccaaacaggactgcttggaaggaacgaaagcacttctcttggaactctcggatttaggttatcgtgtgtccgccaagaaagctcagatttgtcgccgcgaagtgacatacttaggctattcattgcgtgatggtcaacgttggcttactgaggcgcgcaagaagaccgttgttcaaatccccgcccctaccaccgcgaaacagatgcgcaagtttcttggcacggcaggtttctgccgtttgtggattcctggctttgctaccttagcggcacccctctatccactcacgaaagagaaaggagaattctcttgggccccagaacatcagaaagcgtttgacgccatcaagaaagcgttattaagcgctcctgctcttgcattgcccgatgtcaccaaaccattcacgctctacgtggatgaacgcaaaggcgtagcccgcggtgtgttgacacagaccttaggaccttggcgtcgtcccgtggcctacctctcgaagaaacttgacccagttgcaagtggttggcctgtctgcttgaaagctattgccgcagttgcaatcctcgtcaaagatgccgacaaacttactttgggccagaacattactgttatcgcaccacacgcccttgaaaacatcgttcgtcagccacctgatcgctggatgaccaatgctcgcatgacgcattatcagagcctcttgcttaccgaacgcgtgacttttgctccacctgcagccttaaaccccgcaacccttttacccgaagaaacagatgagcctgtgacgcatgactgtcaccagctcttgattgaagaaactggcgtacgcaaagacctcaccgatattccattaacaggtgaggtacttacgtggtttaccaacgggtcctcttatgtcgtcgaaggcaaacgtatggctggtgccgccgttgttgatggcacccgtactatctgggcaagcagcttacccgaaggcacgagtgctcagaaagcagagttgatggccttgacccaagccttacgccttgctgaagggaaatcgatcaatatttacaccgactcacgctatgcattcgccacggcacatgtacacggtgccatctacaaacaacgtggtttgttaacttctgctggccgcgagattaagaacaaagaagaaatcctttccttacttgaagccttacacctccccaaacgtctcgctattattcattgtccagggcatcagaaagcaaaagatcctatcagccgtgggaatcaaatggcagatcgtgtcgctaaacaggcagcccaaggcgttaacttgttgcccatgattgagacccctaaagctcca

SEQ ID NO: 192 - protein, 687 aa, synthetic construct
  REGION 1..687: note = Engineered reverse transcriptase variants
MHHHHHHGGSGVLTLQLDDEYRLYSPLVKPDQNIQFWLEQFPQAWAETAGMGLAKQVPPQVIQLKASATPVSVRQYPLSKEAQEGIRPHVQRLIQQGILVPVQSPWNTPLLPVRKPGTNDYRPVQDLREVNKRVQDIHPTVPNPYNLLCALPPQRSWYTVLDLKDAFFCLRLHPTSQPLFAFEWRDPDTGRTGQLTWTRLPQGFKNSPTIFDEALHRDLANFRIQHPQVTLLQYVDDLLLAGATKQDCLEGTKALLLELSDLGYRVSAKKAQICRREVTYLGYSLRDGQRWLTEARKKTVVQIPAPTTAKQMRKFLGTAGFCRLWIPGFATLAAPLYPLTKEKGEFSWAPEHQKAFDAIKKALLSAPALALPDVTKPFTLYVDERKGVARGVLTQTLGPWRRPVAYLSKKLDPVASGWPVCLKAIAAVAILVKDADKLTLGQNITVIAPHALENIVRQPPDRWMTNARMTHYQSLLLTERVTFAPPAALNPATLLPEETDEPVTHDCHQLLIEETGVRKDLTDIPLTGEVLTWFTNGSSYVVEGKRMAGAAVVDGTRTIWASSLPEGTSAQKAELMALTQALRLAEGKSINIYTDSRYAFATAHVHGAIYKQRGLLTSAGREIKNKEEILSLLEALHLPKRLAIIHCPGHQKAKDPISRGNQMADRVAKQAAQGVNLLPMIETPKAP

SEQ ID NO: 193 - DNA, 2061 bp, synthetic construct
  misc_feature 1..2061: note = Engineered reverse transcriptase variants
  source 1..2061: mol_type = other DNA
atgcatcaccatcaccatcatggtggtagcggagtgctgacccttcagctggatgatgaatatcgcttgtacagtccgctggtcaaaccagaccaaaacattcagttctggctcgaacagtttccgcaagcgtgggctgaaactgctggcatgggcctggccaaacaggttcctcctcaggtaatccaattaaaggcatctgccacgccggtgtcagttcgtcagtatccgctgtcgaaagaagcgcaagaggggattcgcccacacgtgcagcgtttgatccagcagggcattctggtaccggttcaaagcccctggaataccccgcttttaccagtccgcaaaccgggtacaaacgattaccgtcctgtgcaagacctgcgcgaagtcaataaacgtgtgcaggatatccacccaaccgttccgaacccgtataatctgttgtgcgcgttaccgccgcagcgttcctggtacacggtgctggacctgaaggacgcgttcttctgtcttcctctccaccccaccagccagccactgtttgcctttgaatggcgcgatcctgatacgggccgtactgggcaattaacatggacccgtttgccgcagggctttaagaacagtcccaccatttttgatgaggctcttcaccgcgacctcgcaaatttccgcatccaacacccacaggtaacgttactccagtatgtcgatgatcttttgttagcgggtgccaccaaacaggactgcttggaaggaacgaaagcacttctcttggaactctcggatttaggttatcgtgtgtccgccaagaaagctcagatttgtcgccgcgaagtgacatacttaggctattcattgcgtgatggtcaacgttggcttactgaggcgcgcaagaagaccattgttcaaatccccgcccctaccaccgcgaagcagatgcgtgaatttcttggcacggcaggtttctgccgtttgtggattcctggctttgctaccttagcggcacccctctatccactcacgaaagagaaaggagaattctcttgggccccagaacatcagaaagcgtttgacgccatcaagaaagcgttattaagcgctcctgctcttgcattgcccgatgtcaccaaaccattcacgctctacgtggatgaacgcaaaggcgtagcccgcggtgtgttgacacagaccttaggaccttggcgtcgtcccgtggcctacctctcgaagaaacttgacccagttgcaagtggttggcctgtctgcttgaaagctattgccgcagttgcaatcctcgtcaaagatgccgacaaacttactttgggccagaacatcactgttattgcaccacacgcccttgaagcaatcgttcgtcagccacctgatcgctggatgaccaatgctcgcatgacgcattatcagagcctcttgcttaccgatcgcgtgacttttgctccacctgcagccttaaaccccgcaacccttttacccgaagaaacagatgagcctgtgacgcatgactgtctgcagctcttgattgaagaaactggcgtacgcaaagacctcaccgatattccattaacaggtgaggtacttacgtggtttaccgatgggtcctcttatgtcgtcgaaggcaaacgtatggctggtgccgccgttgttgatggcacccgtactatctgggcaagcagcttacccgaaggcacgagtgctcagaaagcagagttgatggccttgacccaagccttacgccttgctgaagggaaatcgatcaatatttacaccgactcacgctatgcattcgccacggcacatgtacacggtgccatctacaaacaacgtggtttgttaacttctgctggccgcgagattaagaacaaagaagaaatcctttccttacttgaagccttacacctccccaaacgtctcgctattattcattgtccagggcatcagaaagcaaaagatcctatcagccgtgggaatcgtatggcagatcgtgtcgctaaacaggcagcccaaggcgttaacttgttgcccatgattgagacccctaaagctcca

SEQ ID NO: 194 - protein, 687 aa, synthetic construct
  REGION 1..687: note = Engineered reverse transcriptase variants
MHHHHHHGGSGVLTLQLDDEYRLYSPLVKPDQNIQFWLEQFPQAWAETAGMGLAKQVPPQVIQLKASATPVSVRQYPLSKEAQEGIRPHVQRLIQQGILVPVQSPWNTPLLPVRKPGTNDYRPVQDLREVNKRVQDIHPTVPNPYNLLCALPPQRSWYTVLDLKDAFFCLPLHPTSQPLFAFEWRDPDTGRTGQLTWTRLPQGFKNSPTIFDEALHRDLANFRIQHPQVTLLQYVDDLLLAGATKQDCLEGTKALLLELSDLGYRVSAKKAQICRREVTYLGYSLRDGQRWLTEARKKTIVQIPAPTTAKQMREFLGTAGFCRLWIPGFATLAAPLYPLTKEKGEFSWAPEHQKAFDAIKKALLSAPALALPDVTKPFTLYVDERKGVARGVLTQTLGPWRRPVAYLSKKLDPVASGWPVCLKAIAAVAILVKDADKLTLGQNITVIAPHALEAIVRQPPDRWMTNARMTHYQSLLLTDRVTFAPPAALNPATLLPEETDEPVTHDCLQLLIEETGVRKDLTDIPLTGEVLTWFTDGSSYVVEGKRMAGAAVVDGTRTIWASSLPEGTSAQKAELMALTQALRLAEGKSINIYTDSRYAFATAHVHGAIYKQRGLLTSAGREIKNKEEILSLLEALHLPKRLAIIHCPGHQKAKDPISRGNRMADRVAKQAAQGVNLLPMIETPKAP

SEQ ID NO: 195 - DNA, 2061 bp, synthetic construct
  misc_feature 1..2061: note = Engineered reverse transcriptase variants
  source 1..2061: mol_type = other DNA
atgcatcaccatcaccatcatggtggtagcggagtgctgacccttcagctggatgatgaatatcgcttgtacagtccgctggtcaaaccagaccaaaacattcagttctggctcgaacagtttccgcaagcgtgggctgaaactgctggcatgggcctggccaaacaggttcctcctcaggtaatccaattaaaggcatctgccacgccggtgtcagttcgtcagtatccgctgtcgaaagaagcgcaagaggggattcgcccacacgtgcagcgtttgatccagcagggcattctggtaccggttcaaagcccctggaataccccgcttttaccagtccgcaaaccgggtacaaacgattaccgtcctgtgcaagacctgcgcgaagtcaataaacgtgtgcaggatatccacccaaccgttccgaacccgtataatctgttgtgcgcgttaccgccgcagcgttcctggtacacggtgctggacctgaaggacgcgttcttctgtcttcctctccaccccaccagccagccactgtttgcctttgaatggcgcgatcctgatacgggccgtactgggcaattaacatggacccgtttgccgcagggctttaagaacagtcccaccatttttgatgaggctcttcaccgcgacctcgcaaatttccgcatccaacacccacaggtaacgttactccagtatgtcgatgatcttttgttagcggctgccaccaaacaggactgcttggaaggaacgaaagcacttctcttggaactctcggatttaggttatcgtgtgtccgccaagaaagctcagatttgtcgccgcgaagtgacatacttaggctattcattgcgtgatggtcaacgttggcttactgaggcgcgcaagaagaccattgttcaaatccccgcccctaccaccgcgaagcagatgcgtgaatttcttggcacggcaggtttctgccgtttgtggattcctggctttgctaccttagcggcacccctctatccactcacgaaagagaaaggagaattctcttgggccccagaacatcagaaagcgtttgacgccatcaagaaagcgttattaagcgctcctgctcttgcattgcccgatgtcaccaaaccattcacgctctacgtggatgaacgcaaaggcgtagcccgcggtgtgttgacacagaccttaggaccttggcgtcgtcccgtggcctacctctcgaagaaacttgacccagttgcaagtggttggcctgtctgcttgaaagctattgccgcagttgcaatcctcgtcaaagatgccgacaaacttactttgggccagaacatcactgttattgcaccacacgcccttgaaaatatcgttcgtcagccacctgatcgctggatgaccaatgctcgcatgacgcattatcagagcctcttgcttaccgaacgcgtgacttttgctccacctgcagccttaaaccccgcaacccttttacccgaagaaacagatgagcctgtgacgcatgactgtctgcagctcttgattgaagaaactggcgtacgcaaagacctcaccgatattccattaacaggtgaggtacttacgtggtttaccgatgggtcctcttatgtcgtcgaaggcaaacgtatggctggtgccgccgttgttgatggcacccgtactatctgggcaagcagcttacccgaaggcacgagtgctcagaaagcagagttgatggccttgacccaagccttacgccttgctgaagggaaatcgatcaatatttacaccgactcacgctatgcattcgccacggcacatgtacacggtgccatctacaaacaacgtggtttgttaacttctgctggccgcgagattaagaacaaagaagaaatcctttccttacttgaagccttacacctccccaaacgtctcgctattattcattgtccagggcatcagaaagcaaaagatcctatcagccgtgggaatcgtatggcagatcgtgtcgctaaacaggcagcccaaggcgttaacttgttgcccatgattgagacccctaaagctcca

SEQ ID NO: 196 - protein, 687 aa, synthetic construct
  REGION 1..687: note = Engineered reverse transcriptase variants
MHHHHHHGGSGVLTLQLDDEYRLYSPLVKPDQNIQFWLEQFPQAWAETAGMGLAKQVPPQVIQLKASATPVSVRQYPLSKEAQEGIRPHVQRLIQQGILVPVQSPWNTPLLPVRKPGTNDYRPVQDLREVNKRVQDIHPTVPNPYNLLCALPPQRSWYTVLDLKDAFFCLPLHPTSQPLFAFEWRDPDTGRTGQLTWTRLPQGFKNSPTIFDEALHRDLANFRIQHPQVTLLQYVDDLLLAAATKQDCLEGTKALLLELSDLGYRVSAKKAQICRREVTYLGYSLRDGQRWLTEARKKTIVQIPAPTTAKQMREFLGTAGFCRLWIPGFATLAAPLYPLTKEKGEFSWAPEHQKAFDAIKKALLSAPALALPDVTKPFTLYVDERKGVARGVLTQTLGPWRRPVAYLSKKLDPVASGWPVCLKAIAAVAILVKDADKLTLGQNITVIAPHALENIVRQPPDRWMTNARMTHYQSLLLTERVTFAPPAALNPATLLPEETDEPVTHDCLQLLIEETGVRKDLTDIPLTGEVLTWFTDGSSYVVEGKRMAGAAVVDGTRTIWASSLPEGTSAQKAELMALTQALRLAEGKSINIYTDSRYAFATAHVHGAIYKQRGLLTSAGREIKNKEEILSLLEALHLPKRLAIIHCPGHQKAKDPISRGNRMADRVAKQAAQGVNLLPMIETPKAP

SEQ ID NO: 197 - DNA, 2061 bp, synthetic construct
  misc_feature 1..2061: note = Engineered reverse transcriptase variants
  source 1..2061: mol_type = other DNA
atgcatcaccatcaccatcatggtggtagcggagtgctgacccttcagctggatgatgaatatcgcttgtacagtccgctggtcaaaccagaccaaaacattcagttctggctcgaacagtttccgcaagcgtgggctgaaactggtggcatgggcctggccaaacaggttcctcctcaggtaatccaattaaaggcatctgccacgccggtgtcagttcgtcagtatccgctgtcgaaagaagcgcaagaggggattcgcccacacgtgcagcgtttgatccagcagggcattctggtaccggttcaaagcccctggaataccccgcttttaccagtccgcaaaccgggtacaaacgattaccgtcctgtgcaagacctgcgcgaagtcaataaacgtgtgcaggatatccacccaaccgttccgaacccgtataatctgttgtgcgcgttaccgccgcagcgttcctggtacacggtgctggacctgaaggacgcgttcttctgtcttcgcctccaccccaccagccagccactgtttgcctttgaatggcgcgatcctgatacgggccgtactgggcaattaacatggacccgtttgccgcagggctttaagaacagtcccaccatttttgatgaggctcttcatcgcgacctcgcaaatttccgcatccaacacccacaggtaacgttactccagtatgtcgatgatcttttgttagcgggtgccaccaaacaggactgcttggaaggaacgaaagcacttctcttggaactctcggatttaggttatcgtgtgtccgccaagaaagctcagatttgtcgccgcgaagtgacatacttaggctattcattgcgtgatggtcaacgttggcttactgaggcgcgcaagaagaccgttgttcaaatccccgcccctaccaccgcgaaacagatgcgtgaatttcttggcacggcaggtttctgccgtttgtggattcctggctttgctgaattagcggcacccctctatccactcacgaaagagaaaggagaattctcttgggccccagaacatcagaaagcgtttgacgccatcaagaaagcgttattaagcgctcctgctcttgcattgcccgatgtcaccaaaccattcacgctctacgtggatgaacgcaaaggcgtagcccgcggtgtgttgacacagaccttaggaccttggcgtcgtcccgtggcctacctctcgaagaaacttgacccagttgcaagtggttggcctgtctgcttgaaagctattgccgcagttgcaatcctcgtcaaagatgccgacaaacttactttgggccagaacattactgttattgcaccacacgcccttgaaaacatcgttcgtcagccacctgatcgctggatgaccaatgctcgcatgacgcattatcagagcctcttgcttaccgaacgcgtgacttttgctccacctgcagccttaaaccccgcaacccttttacccgaagaaacagatgagcctgtgacgcatgactgtcaccagctcttgattgaagaaactggcgtacgcaaagacctcaccgatattccattaacaggtgaggtacttacgtggtttaccgaggggtcctcttatgtcgtcgaaggcaaacgtatggctggtgccgccgttgttgatggcacccgtactatctgggcaagcagcttacccgaaggcacgagtgctcagaaagcagagttgatggccttgacccaagccttacgccttgctgaagggaaatcgatcaatatttacaccgactcacgctatgcattcgccacggcacatgtacacggtgccatctacaaacaacgtggtttgttaacttctgctggccgcgagattaagaacaaagaagaaatcctttccttacttgaagccttacacctccccaaacgtctcgctattattcattgtccagggcatcagaaagcaaaagatcctatcagccgtgggaatcaaatggcagatcgtgtcgctaaacaggcagcccaaggcgttaacttgttgcccatgattgagacccctaaagctcca

SEQ ID NO: 198 - protein, 687 aa, synthetic construct
  REGION 1..687: note = Engineered reverse transcriptase variants
MHHHHHHGGSGVLTLQLDDEYRLYSPLVKPDQNIQFWLEQFPQAWAETGGMGLAKQVPPQVIQLKASATPVSVRQYPLSKEAQEGIRPHVQRLIQQGILVPVQSPWNTPLLPVRKPGTNDYRPVQDLREVNKRVQDIHPTVPNPYNLLCALPPQRSWYTVLDLKDAFFCLRLHPTSQPLFAFEWRDPDTGRTGQLTWTRLPQGFKNSPTIFDEALHRDLANFRIQHPQVTLLQYVDDLLLAGATKQDCLEGTKALLLELSDLGYRVSAKKAQICRREVTYLGYSLRDGQRWLTEARKKTVVQIPAPTTAKQMREFLGTAGFCRLWIPGFAELAAPLYPLTKEKGEFSWAPEHQKAFDAIKKALLSAPALALPDVTKPFTLYVDERKGVARGVLTQTLGPWRRPVAYLSKKLDPVASGWPVCLKAIAAVAILVKDADKLTLGQNITVIAPHALENIVRQPPDRWMTNARMTHYQSLLLTERVTFAPPAALNPATLLPEETDEPVTHDCHQLLIEETGVRKDLTDIPLTGEVLTWFTEGSSYVVEGKRMAGAAVVDGTRTIWASSLPEGTSAQKAELMALTQALRLAEGKSINIYTDSRYAFATAHVHGAIYKQRGLLTSAGREIKNKEEILSLLEALHLPKRLAIIHCPGHQKAKDPISRGNQMADRVAKQAAQGVNLLPMIETPKAP

SEQ ID NO: 199 - DNA, 2061 bp, synthetic construct
  misc_feature 1..2061: note = Engineered reverse transcriptase variants
  source 1..2061: mol_type = other DNA
atgcatcaccatcaccatcatggtggtagcggagtgctgacccttcagctggatgatgaatatcgcttgtacagtccgctggtcaaaccagaccaaaacattcagttctggctcgaacagtttccgcaagcgtgggctgaaactgctggcatgggcctggccaaacaggttcctcctcaggtaatccaattaaaggcatctgccacgccggtgtcagttcgtcagtatccgctgtcgaaagaagcgcaagaggggattcgcccacacgtgcagcgtttgatccagcagggcattctggtaccggttcaaagcccctggaataccccgcttttaccagtccgtaaaccgggtacaaacgattaccgtcctgtgcaagacctgcgcgaagtcaataaacgtgtgcaggatatccacccaaccgttccgaacccgtataatctgttgtgcgcgttaccgccgcagcgttcctggtacacggtgctggacctgaaggacgcgttcttctgtcttcgcctcgcacccaccagccagccactgtttgcctttgaatggcgcgatcctgatacgggccgtactgggcaattaacatggacccgtttgccgcagggctttaagaacagtcccaccatttttgatgaggctcttcgtcgcgacctcgcaaatttccgcatccaacacccacaggtaacgttactccagtatgtcgatgatcttttgttagcgggtgccaccaaacaggactgcttggaaggaacgaaagcacttctcttggaactctcggatttaggttatcgtgtgtccgccaagaaagctcagatttgtcgccgcgaagtgacatacttaggctattcattgcgtgatggtcaacgttggcttactgaggcgcgcaagaagaccgttgttcaaatccccgcccctacgaccccgaaacagatgcgtgaatttcttggcacggcaggtttttgccgtttgtggattcctggctttgctacgttagcggcacccctctatccactcacgaaagagaaaggagaattctcttgggccccagaacatcagaaagcgtttgacgccatcaagaaagcgttattaagcgctcctgctcttgcattgcccgatgtcaccaaaccattcacgctctacgtggatgaacgcaaaggcgtagcccgcggtgtgttgacacagaccttaggaccttggcgtcgtcccgtggcctacctctcgaagaaacttgacccagttgcaagtggttggcctgtctgcttgaaagctattgccgcagttgcaatcctcgtcaaagatgccgacaaacttactttgggccagaacattactgttattgcaccacacgcccttgaaaacatcgttcgtcagccacctgatcgctggatgaccaatgctcgcatgacgcattatcagagcctcttgcttaccgaacgcgtgacttttgctccacctgcagccttaaaccccgcaacccttttacccgaagaaacagatgagcctgtgacgcatgactgtcaccagctcttgattgaagaaactggcgtacgcaaagacctcaccgatattccattaacaggtgaggtacttacgtggtttaccgaggggtcctcttatgtcgtcgaaggcaaacgtatggctggtgccgccgttgttgatggcacccgtactatctgggcaagcagcttacccgaaggcacgagtgctcagaaagcagatttgatggccttgacccaagccttacgccttgctgaagggaaatcgatcaatatttacaccgactcacgcagcgcattcgccacggcacatgtacacggtgccatctacaaacaacgtggtttgttaacttctgctggccgcgagattaagaacaaagaagaaatcctttccttacttgaagccttacacctccccaaacgtctcgctattattcattgtccagggcatcagaaagcaaaagatcctatcagccgtgggaatcaaatggcagatcgtgtcgctaaacaggcagcccaaggcgttaacttgttgcccatgattgagacccctaaagctcca

SEQ ID NO: 200 - protein, 687 aa, synthetic construct
  REGION 1..687: note = Engineered reverse transcriptase variants
MHHHHHHGGSGVLTLQLDDEYRLYSPLVKPDQNIQFWLEQFPQAWAETAGMGLAKQVPPQVIQLKASATPVSVRQYPLSKEAQEGIRPHVQRLIQQGILVPVQSPWNTPLLPVRKPGTNDYRPVQDLREVNKRVQDIHPTVPNPYNLLCALPPQRSWYTVLDLKDAFFCLRLAPTSQPLFAFEWRDPDTGRTGQLTWTRLPQGFKNSPTIFDEALRRDLANFRIQHPQVTLLQYVDDLLLAGATKQDCLEGTKALLLELSDLGYRVSAKKAQICRREVTYLGYSLRDGQRWLTEARKKTVVQIPAPTTPKQMREFLGTAGFCRLWIPGFATLAAPLYPLTKEKGEFSWAPEHQKAFDAIKKALLSAPALALPDVTKPFTLYVDERKGVARGVLTQTLGPWRRPVAYLSKKLDPVASGWPVCLKAIAAVAILVKDADKLTLGQNITVIAPHALENIVRQPPDRWMTNARMTHYQSLLLTERVTFAPPAALNPATLLPEETDEPVTHDCHQLLIEETGVRKDLTDIPLTGEVLTWFTEGSSYVVEGKRMAGAAVVDGTRTIWASSLPEGTSAQKADLMALTQALRLAEGKSINIYTDSRSAFATAHVHGAIYKQRGLLTSAGREIKNKEEILSLLEALHLPKRLAIIHCPGHQKAKDPISRGNQMADRVAKQAAQGVNLLPMIETPKAP

SEQ ID NO: 201 - DNA, 2061 bp, synthetic construct
  misc_feature 1..2061: note = Engineered reverse transcriptase variants
  source 1..2061: mol_type = other DNA
atgcatcaccatcaccatcatggtggtagcggagtgctgacccttcagctggatgatgaatatcgcttgtacagtccgctggtcaaaccagaccaaaacattcagttctggctcgaacagtttccgcaagcgtgggctgaaactgctggcatgggcctggccaaacaggttcctcctcaggtaatccagttaaaggcatctgccacgccggtgtcagttcgtcagtatccgctgtcgaaagaagcgcaagaggggattcgcccacacgttcagcgtttgatccagcagggcattctggtaccggttcaaagcccctggaataccccgcttttaccagtccgtaaaccgggtacaaacgattaccgtcctgtgcaagacctgcgcgaagtcaataaacgtgtgcaggatatccacccaaccgttccgaacccgtataatctgttgtgcgcgttaccgccgcagcgttcctggtacacggtgctggacctgaaggacgcgttcttctgtcttcgcctccatcccaccagccagccactgtttgcctttgaatggcgcgatcctgatacgggccgtactgggcaattaacatggacccgtttgccgcagggctttaagaacagtcccaccatttttgatgaggctcttcatcgcgacctcgcaaatttccgcatccaacacccacaggtaacgttactccagtatgtcgatgatcttttgttagcgggtgccaccaaacaggactgcttggaaggaacgaaagcacttctcttggaactctcggatttaggttatcgtgtgtccgccaagaaagctcagatttgtcgccgcgaagtgacatacttaggctattcattgcgtgatggtcaacgttggcttactgaggcgcgcaagaagaccgttgttcaaatccccgcccctacgaccgcgaaacagatgcgtgaatttcttggcacggcaggtttttgccgtttgtggattcctggctttgctacgttagcggcacccctctatccactcacgaaagagaaaggagaattctcttgggctccagaacatcagaaagcgtttgacgccatcaagaaagcgttattaagcgctcctgctcttgcattgcccgatgtcaccaaaccattcacgctctacgtggatgaacgcaaaggcgtagcccgcggtgtgttgacacagaccttaggaccttggcgtcgtcccgtggcctacctctcgaagaaacttgacccagttgcaagtggttggcctgtctgcttgaaagctattgccgcagttgcaatcctcgtcaaagatgccgacaaacttactttgggccagaacattactgttattgcaccacacgcccttgaaaacatcgttcgtcagccacctgatcgctggatgaccaatgctcgcatgacgcattatcagagcctcttgcttaccgaacgcgtgacttttgctccacctgcagccttaaaccccgcaacccttttacccgaagaaacagatgagcctgtgacgcatgactgtcaccagctcttgattgaagaaactggcgtacgcaaagacctcaccgatattccattaacaggtgaggtacttacgtggtttaccgaggggtcctcttatgtcgtcgaaggcaaacgtatggctggtgccgccgttgttgatggcacccgtactatctgggcaagcagcttacccgaaggcacgagtgctcagaaagcagagttgatggccttgacccaagccttacgccttgctgaagggaaatcgatcaatatttacaccgactcacgcagcgcattcgccacggcacatgtacacggtgccatctacaaacaacgtggtttgttaacttctgctggccgcgagattaagaacaaagaagaaatcctttccttacttgaagccttacacctccccaaacgtctcgctattattcattgtccagggcatcagaaagcaaaagatcctatcagccgtgggaatcaaatggcagatcgtgtcgctaaacaggcagcccaaggcgttaacttgttgcccatgattgagacccctaaagctcca

SEQ ID NO: 202 - protein, 687 aa, synthetic construct
  REGION 1..687: note = Engineered reverse transcriptase variants
MHHHHHHGGSGVLTLQLDDEYRLYSPLVKPDQNIQFWLEQFPQAWAETAGMGLAKQVPPQVIQLKASATPVSVRQYPLSKEAQEGIRPHVQRLIQQGILVPVQSPWNTPLLPVRKPGTNDYRPVQDLREVNKRVQDIHPTVPNPYNLLCALPPQRSWYTVLDLKDAFFCLRLHPTSQPLFAFEWRDPDTGRTGQLTWTRLPQGFKNSPTIFDEALHRDLANFRIQHPQVTLLQYVDDLLLAGATKQDCLEGTKALLLELSDLGYRVSAKKAQICRREVTYLGYSLRDGQRWLTEARKKTVVQIPAPTTAKQMREFLGTAGFCRLWIPGFATLAAPLYPLTKEKGEFSWAPEHQKAFDAIKKALLSAPALALPDVTKPFTLYVDERKGVARGVLTQTLGPWRRPVAYLSKKLDPVASGWPVCLKAIAAVAILVKDADKLTLGQNITVIAPHALENIVRQPPDRWMTNARMTHYQSLLLTERVTFAPPAALNPATLLPEETDEPVTHDCHQLLIEETGVRKDLTDIPLTGEVLTWFTEGSSYVVEGKRMAGAAVVDGTRTIWASSLPEGTSAQKAELMALTQALRLAEGKSINIYTDSRSAFATAHVHGAIYKQRGLLTSAGREIKNKEEILSLLEALHLPKRLAIIHCPGHQKAKDPISRGNQMADRVAKQAAQGVNLLPMIETPKAP

SEQ ID NO: 203 - DNA, 2061 bp, synthetic construct
  misc_feature 1..2061: note = Engineered reverse transcriptase variants
  source 1..2061: mol_type = other DNA
atgcatcaccatcaccatcatggtggtagcggagtgctgacccttcagctggatgatgaatatcgcttgtacagtccgctggtcaaaccagaccaaaacattcagttctggctcgaacagtttccgcaagcgtgggctgaaactgcaggcatgggcctggccaaacaggttcctcctcaggtaatccagttaaaggcatctgcgacgccggtgtcagttcgtcagtatccgctgtcgaaagaagcgcaagaggggattcgcccacacgtgcagcgtttgatccagcagggcattctggtaccggttcaaagcccctggaataccccgcttttaccagtccgcaaaccgggtacaaacgattaccgtcctgtgcaagacctgcgcgaagtcaataaacgtgtgcaggatatccacccaaccgttccgaacccgtataatctgttgtgcgcgttaccgccgcagcgttcctggtacacggtgctggacctgaaggacgcgtacttctgtcttcgcctccaccccaccagccagccactgtttgcctttgaatggcgcgatcctgatacgggccgtactgggcaattaacatggacccgtttgccgcagggctttaagaacagtcccaccatttttgatgaggctcttcaccgcgacctcgcaaatttccgcatccaacacccacaggtaacgttactccagtatgtcgatgatcttttgttagcgggtgccaccaaacaggactgcttggaaggaacgaaagcacttctcttggaactctcgaacttaggttatcgtgtgtccgccaagaaagctcagatttgtcgccgcgaagtgacatacttaggctattcattgcgtgatggtcaacgttggcttactgaggcgcgcaagcgcaccgttgttcaacagcccgcccctaccaccgcgaaacagatgcgcgagtttcttggcacggcaggtttctgccgtttgtggattcctggctttgctaccttagcggcacccctctatccactcacgaaagagaaaggagaattctcttgggccccagaacatcagaaagcgtttgacgccatcaagaaagcgttattaagcgctcctgctcttgcattgcccgatgtcaccaaaccattcacgctctacgtggatgaacgcaaaggcgtagcccgcggtgtgttgacacagaccttaggaccttggcgtcgtcccgtggcctacctctcgaagaaacttgacccagttgcaagtggttggcctgtctgcttgaaagctattgccgcagttgcaatcctcgtcaaagatgccgacaaacttactttgggccagaacattactgttcgcgcaccacacgcccttgaaaacatcgttcgtcagccacctgatcgctggatgaccaaagctcgcatgacgcattatcagagcctcttgcttaccgaacgcgtgacttttgctccacctgcagccttaaaccccgcaacccttttacccgaagaaacagatgagcctgtgacgcatgactgtcaccagctcttgattgaagaaactggcgtacgcaaagacctcaccgatattccattaacaggtgaggtacttacgtggtttaccgacgggtcctcttatgtcgtcgaaggcaaacgtatggctggtgccgccgttgttgatggcacccgtactatctgggcaagcagcttacccgaaggcacgagtgctcagaaagcacaattgatggccttgacccaagccttacgccttgctgaagggaaatcgatcaatatttacaccgactcacgctatgcattcgccacggcacatgtacacggtgccatctacaaacaacgtggtttgttaacttctgctggccgcgagattaagaacaaagaagaaatcctttccttacttgaagccttacacctccccaaacgtctcgctattattcattgtccagggcatcagaaagcaaaagatcctatcagccgtgggaatcaaatggcagatcgtgtcgctaaacaggcagcccaaggcgttaacttgttgcccatgattgagacccctaaagctcca

SEQ ID NO: 204 - protein, 687 aa, synthetic construct
  REGION 1..687: note = Engineered reverse transcriptase variants
MHHHHHHGGSGVLTLQLDDEYRLYSPLVKPDQNIQFWLEQFPQAWAETAGMGLAKQVPPQVIQLKASATPVSVRQYPLSKEAQEGIRPHVQRLIQQGILVPVQSPWNTPLLPVRKPGTNDYRPVQDLREVNKRVQDIHPTVPNPYNLLCALPPQRSWYTVLDLKDAYFCLRLHPTSQPLFAFEWRDPDTGRTGQLTWTRLPQGFKNSPTIFDEALHRDLANFRIQHPQVTLLQYVDDLLLAGATKQDCLEGTKALLLELSNLGYRVSAKKAQICRREVTYLGYSLRDGQRWLTEARKRTVVQQPAPTTAKQMREFLGTAGFCRLWIPGFATLAAPLYPLTKEKGEFSWAPEHQKAFDAIKKALLSAPALALPDVTKPFTLYVDERKGVARGVLTQTLGPWRRPVAYLSKKLDPVASGWPVCLKAIAAVAILVKDADKLTLGQNITVRAPHALENIVRQPPDRWMTKARMTHYQSLLLTERVTFAPPAALNPATLLPEETDEPVTHDCHQLLIEETGVRKDLTDIPLTGEVLTWFTDGSSYVVEGKRMAGAAVVDGTRTIWASSLPEGTSAQKAQLMALTQALRLAEGKSINIYTDSRYAFATAHVHGAIYKQRGLLTSAGREIKNKEEILSLLEALHLPKRLAIIHCPGHQKAKDPISRGNQMADRVAKQAAQGVNLLPMIETPKAP

SEQ ID NO: 205 - DNA, 2061 bp, synthetic construct
  misc_feature 1..2061: note = Engineered reverse transcriptase variants
  source 1..2061: mol_type = other DNA
atgcatcaccatcaccatcatggtggtagcggagtgctgacccttcagctggatgatgaatatcgcttgtacagtccgctggtcaaaccagaccaaaacattcagttctggctcgaacagtttccgcaagcgtgggctgaaactgctggcatgggcctggccaaacaggttcctcctcaggtaatccaattaaaggcatctgccacgccggtgtcagttcgtcagtatccgctgtcgaaagaagcgcaagaggggattcgcccacacgtgcagcgtttgatccagcagggcattctggtaccggttcaaagcccctggaataccccgcttttaccagtccgtaaaccgggtacaaacgattaccgtcctgtgcaagacctgcgcgaagtcaataaacgtgtgcaggatatccacccaaccgttccgaacccgtataatctgttgtgcgcgttaccgccgcagcgttcctggtacacggtgctggacctgaaggacgcgttcttctgtcttcgcctcgcacccaccagccagccactgtttgcctttgaatggcgcgatcctgatacgggccgtactgggcaattaacatggacccgtttgccgcagggctttaagaacagtcccaccatttttgatgaggctcttcatcgcgacctcgcaaatttccgcatccaacacccacaggtaacgttactccagtatgtcgatgatcttttgttagcgggtgccaccaaacaggactgcttggaaggaacgaaagcacttctcttggaactctcggatttaggttatcgtgtgtccgccaagaaagctcagatttgtcgccgcgaagtgacatacttaggctattcattgcgtgatggtcaacgttggcttactgaggcgcgcaagaagaccgttgttcaaatccccgcccctacgaccgcgaaacagatgcgtgaatttcttggcacggcaggtttctgccgtttgtggattcctggctttgctaccttagcggcacccctctatccactcacgaaagagaaaggagaattctcttgggccccagaacatcagaaagcgtttgacgccatcaagaaagcgttattaagcgctcctgctcttgcattgcccgatgtcaccaaaccattcacgctctacgtggatgaacgcaaaggcgtagcccgcggtgtgttgacacagaccttaggaccttggcgtcgtcccgtggcctacctctcgaagaaacttgacccagttgcaagtggttggcctgtctgcttgaaagctattgccgcagttgcaatcctcgtcaaagatgccgacaaacttactttgggccagaacattactgttattgcaccacacgcccttgaaaacatcgttcgtcagccacctgatcgctggatgaccaatgctcgcatgacgcattatcagagcctcttgcttaccgaacgcgtgacttttgctccacctgcagccttaaaccccgcaacccttttacccgaagaaacagatgagcctgtgacgcatgactgtcaccagctcttgattgaagaaactggcgtacgcaaagacctcaccgatattccattaacaggtgaggtacttacgtggtttaccgaggggtcctcttatgtcgtcgaaggcaaacgtatggctggtgccgccgttgttgatggcacccgtactatctgggcaagcagcttacccgaaggcacgagtgctcagaaagcagagttgatggccttgacccaagccttacgccttgctgaagggaaatcgatcaatatttacaccgactcacgcagcgcattcgccacggcacatgtacacggtgccatctacaaacaacgtggtttgttaacttctgctggccgcgagattaagaacaaagaagaaatcctttccttacttgaagccttacacctccccaaacgtctcgctattattcattgtccagggcatcagaaagcaaaagatcctatcagccgtgggaatcaaatggcagatcgtgtcgctaaacaggcagcccaaggcgttaacttgttgcccatgattgagacccctaaagctcca

SEQ ID NO: 206 - protein, 687 aa, synthetic construct
  REGION 1..687: note = Engineered reverse transcriptase variants
MHHHHHHGGSGVLTLQLDDEYRLYSPLVKPDQNIQFWLEQFPQAWAETAGMGLAKQVPPQVIQLKASATPVSVRQYPLSKEAQEGIRPHVQRLIQQGILVPVQSPWNTPLLPVRKPGTNDYRPVQDLREVNKRVQDIHPTVPNPYNLLCALPPQRSWYTVLDLKDAFFCLRLAPTSQPLFAFEWRDPDTGRTGQLTWTRLPQGFKNSPTIFDEALHRDLANFRIQHPQVTLLQYVDDLLLAGATKQDCLEGTKALLLELSDLGYRVSAKKAQICRREVTYLGYSLRDGQRWLTEARKKTVVQIPAPTTAKQMREFLGTAGFCRLWIPGFATLAAPLYPLTKEKGEFSWAPEHQKAFDAIKKALLSAPALALPDVTKPFTLYVDERKGVARGVLTQTLGPWRRPVAYLSKKLDPVASGWPVCLKAIAAVAILVKDADKLTLGQNITVIAPHALENIVRQPPDRWMTNARMTHYQSLLLTERVTFAPPAALNPATLLPEETDEPVTHDCHQLLIEETGVRKDLTDIPLTGEVLTWFTEGSSYVVEGKRMAGAAVVDGTRTIWASSLPEGTSAQKAELMALTQALRLAEGKSINIYTDSRSAFATAHVHGAIYKQRGLLTSAGREIKNKEEILSLLEALHLPKRLAIIHCPGHQKAKDPISRGNQMADRVAKQAAQGVNLLPMIETPKAP

SEQ ID NO: 207 - DNA, 2061 bp, synthetic construct
  misc_feature 1..2061: note = Engineered reverse transcriptase variants
  source 1..2061: mol_type = other DNA
atgcatcaccatcaccatcatggtggtagcggagtgctgacccttcagctggatgatgaatatcgcttgtacagtccgctggtcaaaccagaccaaaacattcagttctggctcgaacagtttccgcaagcgtgggctgaaactggtggcatgggcctggccaaacaggttcctcctcaggtaatccaattaaaggcatctgccacgccggtgtcagttcgtcagtatccgctgtcgaaagaagcgcaagaggggattcgcccacacgtgcagcgtttgatccagcagggcattctggtaccggttcaaagcccctggaataccccgcttttaccagtcaaaaaaccgggtacaaacgattaccgtcctgtgcaagacctgcgcgaagtcaataaacgtgtgcaggatatccacccaaccgttccgaacccgtataatctgttgtgcgcgttaccgccgcagcgttcctggtacacggtgctggacctgaaggacgcgttcttctgtcttcgcctccatcccaccagccagccactgtttgcctttgaatggcgcgatcctgatacgggccgtactgggcaattaacatggacccgtttgccgcagggctttaagaacagtcccaccatttttgatgaggctcttcaccgcgacctcgcaaatttccgcatccaacacccacaggtaacgttactccagtatgtcgatgatcttttgttagcgggtgccaccaaacaggactgcttggaaggaacgaaagcacttctcttggaactctcggatttaggttatcgtgtgtccgccaagaaagctcagatttgtcgccgcgaagtgacatacttaggctattcattgcgtgatggtcaacgttggcttactgaggcgcgcaagaagaccgttgttcaaatccccgcccctacgaccccgaaacagatgcgtgaatttcttggcacggcaggtttttgccgtttgtggattcctggctttgctacgttagcggcacccctctatccactcacgaaagagaaaggagaattctcttgggccccagaacatcagaaagcgtttgacgccatcaagaaagcgttattaagcgctcctgctcttgcattgcccgatgtcaccaaaccattcacgctctacgtggatgaacgcaaaggcgtagcccgcggtgtgttgacacagaccttaggaccttggcgtcgtcccgtggcctacctctcgaagaaacttgacccagttgcaagtggttggcctgtctgcttgaaagctattgccgcagttgcaatcctcgtcaaagatgccgacaaacttactttgggccagaacattactgttattgcaccacacgcccttgaaaacatcgttcgtcagccacctgatcgctggatgaccaatgctcgcatgacgcattatcagagcctcttgcttaccgaacgcgtgacttttgctccacctgcagccttaaaccccgcaacccttttacccgaagaaacagatgagcctgtgacgcatgactgtcaccagctcttgattgaagaaactggcgtacgcaaagacctcaccgatattccattaacaggtgaggtacttacgtggtttaccgaggggtcctcttatgtcgtcgaaggcaaacgtatggctggtgccgccgttgttgatggcacccgtactatctgggcaagcagcttacccgaaggcacgagtgctcagaaagcagatttgatggccttgacccaagccttacgccttgctgaagggaaatcgatcaatatttacaccgactcacgcagcgcattcgccacggcacatgtacacggtgccatctacaaacaacgtggtttgttaacttctgctggccgcgagattaagaacaaagaagaaatcctttccttacttgaagccttacacctccccaaacgtctcgctattattcattgtccagggcatcagaaagcaaaagatcctatcagccgtgggaatcaaatggcagatcgtgtcgctaaacaggcagcccaaggcgttaacttgttgcccatgattgagacccctaaagctcca

SEQ ID NO: 208 - protein, 687 aa, synthetic construct
  REGION 1..687: note = Engineered reverse transcriptase variants
MHHHHHHGGSGVLTLQLDDEYRLYSPLVKPDQNIQFWLEQFPQAWAETGGMGLAKQVPPQVIQLKASATPVSVRQYPLSKEAQEGIRPHVQRLIQQGILVPVQSPWNTPLLPVKKPGTNDYRPVQDLREVNKRVQDIHPTVPNPYNLLCALPPQRSWYTVLDLKDAFFCLRLHPTSQPLFAFEWRDPDTGRTGQLTWTRLPQGFKNSPTIFDEALHRDLANFRIQHPQVTLLQYVDDLLLAGATKQDCLEGTKALLLELSDLGYRVSAKKAQICRREVTYLGYSLRDGQRWLTEARKKTVVQIPAPTTPKQMREFLGTAGFCRLWIPGFATLAAPLYPLTKEKGEFSWAPEHQKAFDAIKKALLSAPALALPDVTKPFTLYVDERKGVARGVLTQTLGPWRRPVAYLSKKLDPVASGWPVCLKAIAAVAILVKDADKLTLGQNITVIAPHALENIVRQPPDRWMTNARMTHYQSLLLTERVTFAPPAALNPATLLPEETDEPVTHDCHQLLIEETGVRKDLTDIPLTGEVLTWFTEGSSYVVEGKRMAGAAVVDGTRTIWASSLPEGTSAQKADLMALTQALRLAEGKSINIYTDSRSAFATAHVHGAIYKQRGLLTSAGREIKNKEEILSLLEALHLPKRLAIIHCPGHQKAKDPISRGNQMADRVAKQAAQGVNLLPMIETPKAP

SEQ ID NO: 209 - DNA, 2061 bp, synthetic construct
  misc_feature 1..2061: note = Engineered reverse transcriptase variants
  source 1..2061: mol_type = other DNA
atgcatcaccatcaccatcatggtggtagcggagtgctgacccttcagctggatgatgaatatcgcttgtacagtccgctggtcaaaccagaccaaaacattcagttctggctcgaacagtttccgcaagcgtgggctgaaactggtggcatgggcctggccaaacaggttcctcctcaggtaatccaattaaaggcatctgccacgccggtgtcagttcgtcagtatccgctgtcgaaagaagcgcaagaggggattcgcccacacgttcagcgtttgatccagcagggcattctggtaccggttcaaagcccctggaataccccgcttttaccagtcaaaaaaccgggtacaaacgattaccgtcctgtgcaagacctgcgcgaagtcaataaacgtgtgcaggatatccacccaaccgttccgaacccgtataatctgttgtgcgcgttaccgccgcagcgttcctggtacacggtgctggacctgaaggacgcgttcttctgtcttcgcctccaccccaccagccagccactgtttgcctttgaatggcgcgatcctgatacgggccgtactgggcaattaacatggacccgtttgccgcagggctttaagaacagtcccaccatttttgatgaggctcttcatcgcgacctcgcaaatttccgcatccaacacccacaggtaacgttactccagtatgtcgatgatcttttgttagcgggtgccaccaaacaggactgcttggaaggaacgaaagcacttctcttggaactctcggatttaggttatcgtgtgtccgccaagaaagctcagatttgtcgccgcgaagtgacatacttaggctattcattgcgtgatggtcaacgttggcttactgaggcgcgcaagaagaccgttgttcaaatccccgcccctacgaccccgaaacagatgcgtgaatttcttggcacggcaggtttctgccgtttgtggattcctggctttgctacgttagcggcacccctctatccactcacgaaagagaaaggagaattctcttggggtccagaacatcagaaagcgtttgacgccatcaagaaagcgttattaagcgctcctgctcttgcattgcccgatgtcaccaaaccattcacgctctacgtggatgaacgcaaaggcgtagcccgcggtgtgttgacacagaccttaggaccttggcgtcgtcccgtggcctacctctcgaagaaacttgacccagttgcaagtggttggcctgtctgcttgaaagctattgccgcagttgcaatcctcgtcaaagatgccgacaaacttactttgggccagaacattactgttattgcaccacacgcccttgaaaacatcgttcgtcagccacctgatcgctggatgaccaatgctcgcatgacgcattatcagagcctcttgcttaccgaacgcgtgacttttgctccacctgcagccttaaaccccgcaacccttttacccgaagaaacagatgagcctgtgacgcatgactgtcaccagctcttgattgaagaaactggcgtacgcaaagacctcaccgatattccattaacaggtgaggtacttacgtggtttaccgaggggtcctcttatgtcgtcgaaggcaaacgtatggctggtgccgccgttgttgatggcacccgtactatctgggcaagcagcttacccgaaggcacgagtgctcagaaagcagagttgatggccttgacccaagccttacgccttgctgaagggaaatcgatcaatatttacaccgactcacgctatgcattcgccacggcacatgtacacggtgccatctacaaacaacgtggtttgttaacttctgctggccgcgagattaagaacaaagaagaaatcctttccttacttgaagccttacacctccccaaacgtctcgctattattcattgtccagggcatcagaaagcaaaagatcctatcagccgtgggaatcaaatggcagatcgtgtcgctaaacaggcagcccaaggcgttaacttgttgcccatgattgagacccctaaagctcca

SEQ ID NO: 210 - protein, 687 aa, synthetic construct
  REGION 1..687: note = Engineered reverse transcriptase variants
MHHHHHHGGSGVLTLQLDDEYRLYSPLVKPDQNIQFWLEQFPQAWAETGGMGLAKQVPPQVIQLKASATPVSVRQYPLSKEAQEGIRPHVQRLIQQGILVPVQSPWNTPLLPVKKPGTNDYRPVQDLREVNKRVQDIHPTVPNPYNLLCALPPQRSWYTVLDLKDAFFCLRLHPTSQPLFAFEWRDPDTGRTGQLTWTRLPQGFKNSPTIFDEALHRDLANFRIQHPQVTLLQYVDDLLLAGATKQDCLEGTKALLLELSDLGYRVSAKKAQICRREVTYLGYSLRDGQRWLTEARKKTVVQIPAPTTPKQMREFLGTAGFCRLWIPGFATLAAPLYPLTKEKGEFSWGPEHQKAFDAIKKALLSAPALALPDVTKPFTLYVDERKGVARGVLTQTLGPWRRPVAYLSKKLDPVASGWPVCLKAIAAVAILVKDADKLTLGQNITVIAPHALENIVRQPPDRWMTNARMTHYQSLLLTERVTFAPPAALNPATLLPEETDEPVTHDCHQLLIEETGVRKDLTDIPLTGEVLTWFTEGSSYVVEGKRMAGAAVVDGTRTIWASSLPEGTSAQKAELMALTQALRLAEGKSINIYTDSRYAFATAHVHGAIYKQRGLLTSAGREIKNKEEILSLLEALHLPKRLAIIHCPGHQKAKDPISRGNQMADRVAKQAAQGVNLLPMIETPKAP

SEQ ID NO: 211 - DNA, 2061 bp, synthetic construct
  misc_feature 1..2061: note = Engineered reverse transcriptase variants
  source 1..2061: mol_type = other DNA
atgcatcaccatcaccatcatggtggtagcggagtgctgacccttcagctggatgatgaatatcgcttgtacagtccgctggtcaaaccagaccaaaacattcagttctggctcgaacagtttccgcaagcgtgggctgaaactgcaggcatgggcctggccaaacaggttcctcctcaggtaatcccgttaaaggcatcttcgacgccggtgtcagttcgtcagtatccgctgtcgaaaaaggcgcaagaggggattcgcccacacgtgcagcgtttgatccagcagggcattctggtaccggttcaaagcccctggaataccccgcttttaccagtccgcaaaccgggtacaaacgattaccgtcctgtgcaagacctgcgcgaagtcaataaacgtgtgcaggatatccacccaaccgttccgaacccgtataatctgttgtgcgcgttaccgccgcagcgttcctggtacacggtgctggacctgaaggacgcgttcttctgtcttcgcctccaccccaccagccagccactgtttgcctttgaatggcgcgatcctgatacgggccgtactgggcaattaacatggacccgtttgccgcagggctttaagaacagtcccaccatttttgatgaggctcttcaccgcgacctcgcaaatttccgcatccaacacccacaggtaacgttactccagtatgtcgatgatcttttgttagcgggtgccaccaaacaggactgcttggaaggaacgaaagcacttctcttggaactctcggacttaggttatcgtgtgtccgccaagaaagctcagatttgtcgccgcgaagtgacatacttaggctattcattgcgtgatggtcaacgttggcttactgaggcgcgcaagaagaccgttgttcaacagcccgcccctaccaccgcgaaacagatgcgtgaatttcttggcacggcaggtttctgccgtttgtggattcctggctttgctaccttagcggcacccctctatccactcacgaaagagaaaggagaattctcttgggccccagaacatcagaaagcgtttgacgccatcaagaaagcgttattaagcgctcctgctcttgcattgcccgatgtcaccaaaccattcacgctctacgtggatgaacgcaaaggcgtagcccgcggtgtgttgacacagaccttaggaccttggcgtcgtcccgtggcctacctctcgaagaaacttgacccagttgcaagtggttggcctgtctgcttgaaagctattgccgcagttgcaatcctcgtcaaagatgccgacaaacttactttgggccagaacattactgttatcgcaccacacgcccttgaaaacatcgttcgtcagccacctgatcgctggatgaccaaagctcgcatgacgcattatcagagcctcttgcttaccgaacgcgtgacttttgctccacctgcagccttaaaccccgcaacccttttacccgaagaaacagatgagcctgtgacgcatgactgtcaccagctcttgattgaagaaactggcgtacgcaaagacctcaccgatattccattaacaggtgaggtacttacgtggtttaccgacgggtcctcttatgtcgtcgaaggcaaacgtatggctggtgccgccgttgttgatggcacccgtactatctgggcaagcagcttacccgaaggcacgagtgctcagaaagcagagttgatggccttgacccaagccttacgccttgctgaagggaaatcgatcaatatttacaccgactcacgctatgcattcgccacggcacatgtacacggtgccatctacaaacaacgtggtttgttaacttctgctggccgcgagattaagaacaaagaagaaatcctttccttacttgaagccttacacctccccaaacgtctcgctattattcattgtccagggcatcagaaagcaaaagatcctatcagccgtgggaatcaaatggcagatcgtgtcgctaaacaggcagcccaaggcgttaacttgttgcccatgattgagacccctaaagctcca

SEQ ID NO: 212 - protein, 687 aa, synthetic construct
  REGION 1..687: note = Engineered reverse transcriptase variants
MHHHHHHGGSGVLTLQLDDEYRLYSPLVKPDQNIQFWLEQFPQAWAETAGMGLAKQVPPQVIPLKASSTPVSVRQYPLSKKAQEGIRPHVQRLIQQGILVPVQSPWNTPLLPVRKPGTNDYRPVQDLREVNKRVQDIHPTVPNPYNLLCALPPQRSWYTVLDLKDAFFCLRLHPTSQPLFAFEWRDPDTGRTGQLTWTRLPQGFKNSPTIFDEALHRDLANFRIQHPQVTLLQYVDDLLLAGATKQDCLEGTKALLLELSDLGYRVSAKKAQICRREVTYLGYSLRDGQRWLTEARKKTVVQQPAPTTAKQMREFLGTAGFCRLWIPGFATLAAPLYPLTKEKGEFSWAPEHQKAFDAIKKALLSAPALALPDVTKPFTLYVDERKGVARGVLTQTLGPWRRPVAYLSKKLDPVASGWPVCLKAIAAVAILVKDADKLTLGQNITVIAPHALENIVRQPPDRWMTKARMTHYQSLLLTERVTFAPPAALNPATLLPEETDEPVTHDCHQLLIEETGVRKDLTDIPLTGEVLTWFTDGSSYVVEGKRMAGAAVVDGTRTIWASSLPEGTSAQKAELMALTQALRLAEGKSINIYTDSRYAFATAHVHGAIYKQRGLLTSAGREIKNKEEILSLLEALHLPKRLAIIHCPGHQKAKDPISRGNQMADRVAKQAAQGVNLLPMIETPKAP

SEQ ID NO: 213 - DNA, 2061 bp, synthetic construct
  misc_feature 1..2061: note = Engineered reverse transcriptase variants
  source 1..2061: mol_type = other DNA
atgcatcaccatcaccatcatggtggtagcggagtgctgacccttcagctggatgatgaatatcgcttgtacagtccgctggtcaaaccagaccaaaacattcagttctggctcgaacagtttccgcaagcgtgggctgaaactgctggcatgggcctggccaaacaggttcctcctcaggtaatcctgttaaaggcatctgccacgccggtgtcagttcgtcagtatccgctgtcgaaagaagcgcaagaggggattcgcccacacattcagcgtttgatccagcagggcattctggtaccggttcaaagcccctggaataccccgcttttaccagtccgtaaaccgggtacaaacgattaccgtcctgtgcaagacctgcgcgaagtcaataaacgtgtgcaggatatccacccaaccgttccgaacccgtataatctgttgtgcgcgttaccgccgcagcgttcctggtacacggtgctggacctgaaggacgcgttcttctgtcttcgcctccatcccaccagccagccactgtttgcctttgaatggcgcgatcctgatacgggccgtactgggcaattaacatggacccgtttgccgcagggctttaagaacagtcccgcgatctttgatgaggctcttcgtcgcgacctcgcaaatttccgcatccaacacccacaggtaacgttactccagtatgtcgatgatcttttgttagcgggtgccaccaaacaggactgcttggaaggaacgaaagcacttctcttggaactctcggatttaggttatcgtgtgtccgccaagaaagctcagatttgtcgccgcgaagtgacatacttaggctattcattgcgtgatggtcaacgttggcttactgaggcgcgcaagaagaccgttgttcaaatccccgcccctaagaccccgaaacagatgcgtgaatttcttggcacggcaggtgcgtgccgtttgtggattcctggctttgctacgttagcggcacccctctatccactcacgaaagagaaaggagaattctcttggggtccagaacatcagaaagcgtttgacgccatcaagaaagcgttattaagcgctcctgctcttgcattgcccgatgtcaccaaaccattcacgctctacgtggatgaacgcaaaggcgtagcccgcggtgtgttgacacagaccttaggaccttggcgtcgtcccgtggcctacctctcgaagaaacttgacccagttgcaagtggttggcctgtctgcttgaaagctattgccgcagttgcaatcctcgtcaaagatgccgacaaacttactttgggccagaacattactgttattgcaccacacgcccttgaaaacatcgttcgtcagccacctgatcgctggatgaccaatgctcgcatgacgcattatcagagcctcttgcttaccgaacgcgtgacttttgctccacctgcagccttaaaccccgcaacccttttacccgaagaaacagatgagcctgtgacgcatgactgtcaccagctcttgattgaagaaactggcgtacgcaaagacctcaccgatattccattaacaggtgaggtacttacgtggtttaccgaggggtcctcttatgtcgtcgaaggcaaacgtatggctggtgccgccgttgttgatggcacccgtactatctgggcaagcagcttacccgaaggcacgagtgctcagaaagcagatttgatggccttgacccaagccttacgccttgctgaagggaaatcgatcaatatttacaccgactcacgcagcgcattcgccacggcacatgtacacggtgccatctacaaacaacgtggtttgttaacttctgctggccgcgagattaagaacaaagaagaaatcctttccttacttgaagccttacacctccccaaacgtctcgctattattcattgtccagggggtcagaaagcaaaagatcctatcagccgtgggaatcaaatggcagatcgtgtcgctaaacaggcagcccaaggcgttaacttgttgcccatgattgagacccctaaagctcca

SEQ ID NO: 214 - protein, 687 aa, synthetic construct
  REGION 1..687: note = Engineered reverse transcriptase variants
MHHHHHHGGSGVLTLQLDDEYRLYSPLVKPDQNIQFWLEQFPQAWAETAGMGLAKQVPPQVILLKASATPVSVRQYPLSKEAQEGIRPHIQRLIQQGILVPVQSPWNTPLLPVRKPGTNDYRPVQDLREVNKRVQDIHPTVPNPYNLLCALPPQRSWYTVLDLKDAFFCLRLHPTSQPLFAFEWRDPDTGRTGQLTWTRLPQGFKNSPAIFDEALRRDLANFRIQHPQVTLLQYVDDLLLAGATKQDCLEGTKALLLELSDLGYRVSAKKAQICRREVTYLGYSLRDGQRWLTEARKKTVVQIPAPKTPKQMREFLGTAGACRLWIPGFATLAAPLYPLTKEKGEFSWGPEHQKAFDAIKKALLSAPALALPDVTKPFTLYVDERKGVARGVLTQTLGPWRRPVAYLSKKLDPVASGWPVCLKAIAAVAILVKDADKLTLGQNITVIAPHALENIVRQPPDRWMTNARMTHYQSLLLTERVTFAPPAALNPATLLPEETDEPVTHDCHQLLIEETGVRKDLTDIPLTGEVLTWFTEGSSYVVEGKRMAGAAVVDGTRTIWASSLPEGTSAQKADLMALTQALRLAEGKSINIYTDSRSAFATAHVHGAIYKQRGLLTSAGREIKNKEEILSLLEALHLPKRLAIIHCPGGQKAKDPISRGNQMADRVAKQAAQGVNLLPMIETPKAP

SEQ ID NO: 215 - DNA, 2061 bp, synthetic construct
  misc_feature 1..2061: note = Engineered reverse transcriptase variants
  source 1..2061: mol_type = other DNA
atgcatcaccatcaccatcatggtggtagcggagtgctgacccttcagctggatgatgaatatcgcttgtacagtccgctggtcaaaccagaccaaaacattcagttctggctcgaacagtttccgcaagcgtgggctgaaactgctggcatgggcctggccaaacaggttcctcctcaggtaatccaattaaaggcatctgccacgccggtgtcagttcgtcagtatccgctgtcgaaagaagcgcaagaggggattcgcccacacgtgcagcgtttgatccagcagggcattctggtaccggttcaaagcccctggaataccccgcttttaccagtccgtaaaccgggtacaaacgattaccgtcctgtgcaagacctgcgcgaagtcaataaacgtgtgcaggatatccacccaaccgttccgaacccgtataatctgttgtgcgcgttaccgccgcagcgttcctggtacacggtgctggacctgaaggacgcgttcttctgtcttcgcctccatcccaccagccagccactgtttgcctttgaatggcgcgatcctgatacgggccgtactgggcaattaacatggacccgtttgccgcagggctttaagaacagtcccaccatttttgatgaggctcttcgtcgcgacctcgcaaatttccgcatccaacacccacaggtaacgttactccagtatgtcgatgatcttttgttagcgggtgccaccaaacaggactgcttggaaggaacgaaagcacttctcttggaactctcggatttaggttatcgtgtgtccgccaagaaagctcagatttgtcgccgcgaagtgacatacttaggctattcattgcgtgatggtcaacgttggcttactgaggcgcgcaagaagaccgttgttcaaatccccgcccctacgaccgcgaaacagatgcgtgaatttcttggcacggcaggtttttgccgtttgtggattcctggctttgctaccttagcggcacccctctatccactcacgaaagagaaaggagaattctcttgggctccagaacatcagaaagcgtttgacgccatcaagaaagcgttattaagcgctcctgctcttgcattgcccgatgtcaccaaaccattcacgctctacgtggatgaacgcaaaggcgtagcccgcggtgtgttgacacagaccttaggaccttggcgtcgtcccgtggcctacctctcgaagaaacttgacccagttgcaagtggttggcctgtctgcttgaaagctattgccgcagttgcaatcctcgtcaaagatgccgacaaacttactttgggccagaacattactgttattgcaccacacgcccttgaaaacatcgttcgtcagccacctgatcgctggatgaccaatgctcgcatgacgcattatcagagcctcttgcttaccgaacgcgtgacttttgctccacctgcagccttaaaccccgcaacccttttacccgaagaaacagatgagcctgtgacgcatgactgtcaccagctcttgattgaagaaactggcgtacgcaaagacctcaccgatattccattaacaggtgaggtacttacgtggtttaccgacgggtcctcttatgtcgtcgaaggcaaacgtatggctggtgccgccgttgttgatggcacccgtactatctgggcaagcagcttacccgaaggcacgagtgctcagaaagcagagttgatggccttgacccaagccttacgccttgctgaagggaaatcgatcaatatttacaccgactcacgctatgcattcgccacggcacatgtacacggtgccatctacaaacaacgtggtttgttaacttctgctggccgcgagattaagaacaaagaagaaatcctttccttacttgaagccttacacctccccaaacgtctcgctattattcattgtccagggcatcagaaagcaaaagatcctatcagccgtgggaatcaaatggcagatcgtgtcgctaaacaggcagcccaaggcgttaacttgttgcccatgattgagacccctaaagctcca

SEQ ID NO: 216 - protein, 687 aa, synthetic construct
  REGION 1..687: note = Engineered reverse transcriptase variants
MHHHHHHGGSGVLTLQLDDEYRLYSPLVKPDQNIQFWLEQFPQAWAETAGMGLAKQVPPQVIQLKASATPVSVRQYPLSKEAQEGIRPHVQRLIQQGILVPVQSPWNTPLLPVRKPGTNDYRPVQDLREVNKRVQDIHPTVPNPYNLLCALPPQRSWYTVLDLKDAFFCLRLHPTSQPLFAFEWRDPDTGRTGQLTWTRLPQGFKNSPTIFDEALRRDLANFRIQHPQVTLLQYVDDLLLAGATKQDCLEGTKALLLELSDLGYRVSAKKAQICRREVTYLGYSLRDGQRWLTEARKKTVVQIPAPTTAKQMREFLGTAGFCRLWIPGFATLAAPLYPLTKEKGEFSWAPEHQKAFDAIKKALLSAPALALPDVTKPFTLYVDERKGVARGVLTQTLGPWRRPVAYLSKKLDPVASGWPVCLKAIAAVAILVKDADKLTLGQNITVIAPHALENIVRQPPDRWMTNARMTHYQSLLLTERVTFAPPAALNPATLLPEETDEPVTHDCHQLLIEETGVRKDLTDIPLTGEVLTWFTDGSSYVVEGKRMAGAAVVDGTRTIWASSLPEGTSAQKAELMALTQALRLAEGKSINIYTDSRYAFATAHVHGAIYKQRGLLTSAGREIKNKEEILSLLEALHLPKRLAIIHCPGHQKAKDPISRGNQMADRVAKQAAQGVNLLPMIETPKAP

SEQ ID NO: 217 - DNA, 2061 bp, synthetic construct
  misc_feature 1..2061: note = Engineered reverse transcriptase variants
  source 1..2061: mol_type = other DNA
atgcatcaccatcaccatcatggtggtagcggagtgctgacccttcagctggatgatgaatatcgcttgtacagtccgctggtcaaaccagaccaaaacattcagttctggctcgaacagtttccgcaagcgtgggctgaaactgcaggcatgggcctggccaaacaggttcctcctcaggtaatccagttaaaggcatctgccacgccggtgtcagttcgtcagtatccgctgtcgaaagaagcgcaagaggggattcgcccacacgttcagcgtttgatccagcagggcattctggtaccggttcaaagcccctggaataccccgcttttaccagtccgtaaaccgggtacaaacgattaccgtcctgtgcaagacctgcgcgaagtcaataaacgtgtgcaggatatccacccaaccgttccgaacccgtataatctgttgtgcgcgttaccgccgcagcgttcctggtacacggtgctggacctgaaggacgcgttcttctgtcttcgcctcgcacccaccagccagccactgtttgcctttgaatggcgcgatcctgatacgggccgtactgggcaattaacatggacccgtttgccgcagggctttaagaacagtcccacgctgtttgatgaggctcttcaccgcgacctcgcaaatttccgcatccaacacccacaggtaacgttactccagtatgtcgatgatcttttgttagcgggtgccaccaaacaggactgcttggaaggaacgaaagcacttctcttggaactctcggatttaggttatcgtgtgtccgccaagaaagctcagatttgtcgccgcgaagtgacatacttaggctattcattgcgtgatggtcaacgttggcttactgaggcgcgcaagaagaccgttgttcaaatccccgcccctaagaccgcgaaacagatgcgtgaatttcttggcacggcaggtttctgccgtttgtggattcctggctttgctaccttagcggcacccctctatccactcacgaaagagaaaggagaattctcttgggccccagaacatcagaaagcgtttgacgccatcaagaaagcgttattaagcgctcctgctcttgcattgcccgatgtcaccaaaccattcacgctctacgtggatgaacgcaaaggcgtagcccgcggtgtgttgacacagaccttaggaccttggcgtcgtcccgtggcctacctctcgaagaaacttgacccagttgcaagtggttggcctgtctgcttgaaagctattgccgcagttgcaatcctcgtcaaagatgccgacaaacttactttgggccagaacattactgttattgcaccacacgcccttgaaaacatcgttcgtcagccacctgatcgctggatgaccaatgctcgcatgacgcattatcagagcctcttgcttaccgaacgcgtgacttttgctccacctgcagccttaaaccccgcaacccttttacccgaagaaacagatgagcctgtgacgcatgactgtcaccagctcttgattgaagaaactggcgtacgcaaagacctcaccgatattccattaacaggtgaggtacttacgtggtttaccgacgggtcctcttatgtcgtcgaaggcaaacgtatggctggtgccgccgttgttgatggcacccgtactatctgggcaagcagcttacccgaaggcacgagtgctcagaaagcagagttgatggccttgacccaagccttacgccttgctgaagggaaatcgatcaatatttacaccgactcacgcagcgcattcgccacggcacatgtacacggtgccatctacaaacaacgtggtttgttaacttctgctggccgcgagattaagaacaaagaagaaatcctttccttacttgaagccttacacctccccaaacgtctcgctattattcattgtccagggggtcagaaagcaaaagatcctatcagccgtgggaatcaaatggcagatcgtgtcgctaaacaggcagcccaaggcgttaacttgttgcccatgattgagacccctaaagctcca

SEQ ID NO: 218 - protein, 687 aa, synthetic construct
  REGION 1..687: note = Engineered reverse transcriptase variants
MHHHHHHGGSGVLTLQLDDEYRLYSPLVKPDQNIQFWLEQFPQAWAETAGMGLAKQVPPQVIQLKASATPVSVRQYPLSKEAQEGIRPHVQRLIQQGILVPVQSPWNTPLLPVRKPGTNDYRPVQDLREVNKRVQDIHPTVPNPYNLLCALPPQRSWYTVLDLKDAFFCLRLAPTSQPLFAFEWRDPDTGRTGQLTWTRLPQGFKNSPTLFDEALHRDLANFRIQHPQVTLLQYVDDLLLAGATKQDCLEGTKALLLELSDLGYRVSAKKAQICRREVTYLGYSLRDGQRWLTEARKKTVVQIPAPKTAKQMREFLGTAGFCRLWIPGFATLAAPLYPLTKEKGEFSWAPEHQKAFDAIKKALLSAPALALPDVTKPFTLYVDERKGVARGVLTQTLGPWRRPVAYLSKKLDPVASGWPVCLKAIAAVAILVKDADKLTLGQNITVIAPHALENIVRQPPDRWMTNARMTHYQSLLLTERVTFAPPAALNPATLLPEETDEPVTHDCHQLLIEETGVRKDLTDIPLTGEVLTWFTDGSSYVVEGKRMAGAAVVDGTRTIWASSLPEGTSAQKAELMALTQALRLAEGKSINIYTDSRSAFATAHVHGAIYKQRGLLTSAGREIKNKEEILSLLEALHLPKRLAIIHCPGGQKAKDPISRGNQMADRVAKQAAQGVNLLPMIETPKAP

SEQ ID NO: 219 - DNA, 2061 bp, synthetic construct
  misc_feature 1..2061: note = Engineered reverse transcriptase variants
  source 1..2061: mol_type = other DNA
atgcatcaccatcaccatcatggtggtagcggagtgctgacccttcagctggatgatgaatatcgcttgtacgaaccgctggtcaaaccagaccaaaacattcagttctggctcgaacagtttccgcaagcgtgggctgaaactgcaggcatgggcctggccaaacaggttcctcctcaggtaatccaattaaaggcatctgccacgccggtgtcagttcgtcagtatccgctgtcgaaagaagcgcaagaggggattcgcccacacgtgcagcgtttgatccagcagggcattctggtaccgtgtcaaagcccctggaataccccgcttttaccagtccgcaaaccgggtacaaacgattaccgtcctgtgcaagacctgcgcgaagtcaataaacgtgtgcaggatatccacccaaccgttccgaacccgtataatctgttgtgcgcgttaccgccgcagcgttcctggtacacggtgctggacctgaaggacgcgttcttctgtcttcgcctccaccccaccagccagccactgtttgcctttgaatggcgcgatcctgatacgggccgtactgggcaattaacatggacccgtttgccgcagggctttaagaacagtcccaccatttttgatgaggctcttcaccgcgacctcgcaaatttccgcatccaacacccacaggtaacgttactccagtatgtcgatgatcttttgttagcgggtgccaccaaacaggactgcttggaaggaacgaaagcacttctcttggaactcagcgatttaggttatcgtgtgtccgccaagaaagctcagatttgtcgccgcgaagtgacatacttaggctattcattgcgtgatggtcaacgttggcttactgaggcgcgcaagaagaccgttgttcaaatccccgcccctaccaccgcgaaacagatgcgtgaatttcttggcacggcaggtttctgccgtttgtggattcctggctttgctaccttagcggcacccctctatccactcacgaaagagaaaggagaattctcttgggccccagaacatcagaaagcgtttgacgccatcaagaaagcgttattaagcgctcctgctcttgggttgcccgatgtcaccaaaccattcacgctctacgtggatgaacgcaaaggcgtagcccgcggtgtgttgacacagaccttaggaccttggcgtcgtcccgtggcctacctctcgaagaaacttgacccagttgcaagtggttggcctgtctgcttgcgcgctattgccgcagttgcaatcctcgtcaaagatgccgacaaacttactttgggccagaacattactgttattgcaccacacgcccttgaaaacatcgttcgtcagccacctgatcgctggatgaccaatgctcgcatgacgcattatcagagcctcttgcttaccgaacgcgtgacttttgctccacctgcagccttaaaccccgcaacccttttacccgaagaaacagatgagcctgtgacgcatgactgtcaccagctcttgattgaagaaactggcgtacgcaaagacctcaccgatattccattaacaggtgaggtacttacgtggtttaccgatgggtcctcttatgtcgtcgaaggcaaacgtatggctggtgccgccgttgttgatggcacccgtactatctgggcaagcagcttacccgaaggcacgagtgctcagaaagcagagttgatggccttgacccaagccttacgccttgctgaagggaaatcgatcaatatttacaccgactcacgctatgcattcgccacggcacatgtacacggtgccatctacaaacaacgtggtttgttaacttctgctggccgcgagattaagaacaaagaagaaatcctttccttacttgaagccttacacctccccaaacgtctcgctattattcattgtccagggcatcagaaagcaaaagatcctatcagccgtgggaatcaaatggcagatcgtgtcgctaaacaggcagcccaaggcgttaacttgttgcccatgattgagacccctaaagctcca

SEQ ID NO: 220 - protein, 687 aa, synthetic construct
  REGION 1..687: note = Engineered reverse transcriptase variants
MHHHHHHGGSGVLTLQLDDEYRLYEPLVKPDQNIQFWLEQFPQAWAETAGMGLAKQVPPQVIQLKASATPVSVRQYPLSKEAQEGIRPHVQRLIQQGILVPCQSPWNTPLLPVRKPGTNDYRPVQDLREVNKRVQDIHPTVPNPYNLLCALPPQRSWYTVLDLKDAFFCLRLHPTSQPLFAFEWRDPDTGRTGQLTWTRLPQGFKNSPTIFDEALHRDLANFRIQHPQVTLLQYVDDLLLAGATKQDCLEGTKALLLELSDLGYRVSAKKAQICRREVTYLGYSLRDGQRWLTEARKKTVVQIPAPTTAKQMREFLGTAGFCRLWIPGFATLAAPLYPLTKEKGEFSWAPEHQKAFDAIKKALLSAPALGLPDVTKPFTLYVDERKGVARGVLTQTLGPWRRPVAYLSKKLDPVASGWPVCLRAIAAVAILVKDADKLTLGQNITVIAPHALENIVRQPPDRWMTNARMTHYQSLLLTERVTFAPPAALNPATLLPEETDEPVTHDCHQLLIEETGVRKDLTDIPLTGEVLTWFTDGSSYVVEGKRMAGAAVVDGTRTIWASSLPEGTSAQKAELMALTQALRLAEGKSINIYTDSRYAFATAHVHGAIYKQRGLLTSAGREIKNKEEILSLLEALHLPKRLAIIHCPGHQKAKDPISRGNQMADRVAKQAAQGVNLLPMIETPKAP

SEQ ID NO: 221 - DNA, 2061 bp, synthetic construct
  misc_feature 1..2061: note = Engineered reverse transcriptase variants
  source 1..2061: mol_type = other DNA
atgcatcaccatcaccatcatggtggtagcggagtgctgacccttcagctggatgatgaatatcgcttgtacagtccgctggtcaaaccagaccaaaacattcagttctggctcgaacagtttccgcaagcgtgggctgaaactgcaggcatgggcctggccaaacaggttcctcctcaggtaatccagttaaaggcatcttcgacgccggtgtcagttcgtcagtatccgctgtcgaaagaggcgcaagaggggattcgcccacacgtgcagcgtttgatccagcagggcattctggtaccggttcaaagcccctggaataccccgcttttaccagtccgcaaaccgggtacaaacgattaccgtcctgtgcaagacctgcgcgaagtcaataaacgtgtgcaggatatccacccaaccgttccgaacccgtataatctgttgtgcgcgttaccgccgcagcgttcctggtacacggtgctggacctgaaggacgcgttcttctgtcttcgcctccaccccaccagccagccactgtttgcctttgaatggcgcgatcctgatacgggccgtactgggcaattaacatggacccgtttgccgcagggctttaagaacagtcccaccatttttgatgaggctcttcaccgcgacctcgcaaatttccgcatccaacacccacaggtaacgttactccagtatgtcgatgatcttttgttagcgggtgccaccaaacaggactgcttggaaggaacgaaagcacttctcttggaactctcgaacttaggttatcgtgtgtccgccaagaaagctcagatttgtcgccgcgaagtgacatacttaggctattcattgcgtgatggtcaacgttggcttactgaggcgcgcaagcgcaccgttgttcaacagcccgcccctaccaccgcgaaacagatgcgcgagtttcttggcacggcaggtttctgccgtttgtggattcctggctttgctaccttagcggcacccctctatccactcacgaaagaaaaaggagaattctcttgggccccagaacatcagaaagcgtttgacgccatcaagaaagcgttattaagcgctcctgctcttgcattgcccgatgtcaccaaaccattcacgctctacgtggatgaacgcaaaggcgtagcccgcggtgtgttgacacagaccttaggaccttggcgtcgtcccgtggcctacctctcgaagaaacttgacccagttgcaagtggttggcctgtctgcttgaaagctattgccgcagttgcaatcctcgtcaaagatgccgacaaacttactttgggccagaacattactgttatcgcaccacacgcccttgaaaacatcgttcgtcagccacctgatcgctggatgaccaatgctcgcatgacgcattatcagagcctcttgcttaccgaacgcgtgacttttgctccacctgcagccttaaaccccgcaacccttttacccgaagaaacagatgagcctgtgacgcatgactgtcaccagctcttgattgaagaaactggcgtacgcaaagacctcaccgatattccattaacaggtgaggtacttacgtggtttaccgacgggtcctcttatgtcgtcgaaggcaaacgtatggctggtgccgccgttgttgatggcacccgtactatctgggcaagcagcttacccgaaggcacgagtgctcagaaagcagagttgatggccttgacccaagccttacgccttgctgaagggaaatcgatcaatatttacaccgactcacgctatgcattcgccacggcacatgtacacggtgccatctacaaacaacgtggtttgttaacttctgctggccgcgagattaagaacaaagaagaaatcctttccttacttgaagccttacacctccccaaacgtctcgctattattcattgtccagggcatcagaaagcaaaagatcctatcagccgtgggaatcaaatggcagatcgtgtcgctaaacaggcagcccaaggcgttaacttgttgcccatgattgagacccctaaagctcca

SEQ ID NO: 222 - protein, 687 aa, synthetic construct
  REGION 1..687: note = Engineered reverse transcriptase variants
MHHHHHHGGSGVLTLQLDDEYRLYSPLVKPDQNIQFWLEQFPQAWAETAGMGLAKQVPPQVIQLKASSTPVSVRQYPLSKEAQEGIRPHVQRLIQQGILVPVQSPWNTPLLPVRKPGTNDYRPVQDLREVNKRVQDIHPTVPNPYNLLCALPPQRSWYTVLDLKDAFFCLRLHPTSQPLFAFEWRDPDTGRTGQLTWTRLPQGFKNSPTIFDEALHRDLANFRIQHPQVTLLQYVDDLLLAGATKQDCLEGTKALLLELSNLGYRVSAKKAQICRREVTYLGYSLRDGQRWLTEARKRTVVQQPAPTTAKQMREFLGTAGFCRLWIPGFATLAAPLYPLTKEKGEFSWAPEHQKAFDAIKKALLSAPALALPDVTKPFTLYVDERKGVARGVLTQTLGPWRRPVAYLSKKLDPVASGWPVCLKAIAAVAILVKDADKLTLGQNITVIAPHALENIVRQPPDRWMTNARMTHYQSLLLTERVTFAPPAALNPATLLPEETDEPVTHDCHQLLIEETGVRKDLTDIPLTGEVLTWFTDGSSYVVEGKRMAGAAVVDGTRTIWASSLPEGTSAQKAELMALTQALRLAEGKSINIYTDSRYAFATAHVHGAIYKQRGLLTSAGREIKNKEEILSLLEALHLPKRLAIIHCPGHQKAKDPISRGNQMADRVAKQAAQGVNLLPMIETPKAP

SEQ ID NO: 223 - DNA, 2061 bp, synthetic construct
  misc_feature 1..2061: note = Engineered reverse transcriptase variants
  source 1..2061: mol_type = other DNA
atgcatcaccatcaccatcatggtggtagcggagtgctgacccttcagctggatgatgaatatcgcttgtacagtccgctggtcaaaccagaccaaaacattcagttctggctcgaacagtttccgcaagcgtgggctgaaactgcaggcatgggcctggccaaacaggttcctcctcaggtaatccaattaaaggcatctgccacgccggtgtcagttcgtcagtatccgctgtcgaaagaagcgcaagaggggattcgcccacacgtgcagcgtttgatccagcagggcattctggtaccggttcaaagcccctggaataccccgcttttaccagtccgcaaaccgggtacaaacgattaccgtcctgtgcaagacctgcgcgaagtcaataaacgtgtgcaggatatccacccaaccgttccgaacccgtataatctgttgtgcgcgttaccgccgcagcgttcctggtacacggtgctggacctgaaggacgcgttcttctgtcttcgcctccaccccaccagccagccactgtttgcctttgaatggcgcgatcctgatacgggccgtactgggcaattaacatggacccgtttgccgcagggctttaagaacagtcccaccatttttgatgaggctcttcaccgcgacctcgcaaatttccgcatccaacacccacaggtaacgttactccagtatgtcgatgatcttttgttagcgggtgccaccaaacaggactgcttggaaggaacgaaagcacttctcttggaactcagcgatttaggttatcgtgtgtccgccaagaaagctcagatttgtcgccgcgaagtgacatacttaggctattcattgcgtgatggtcaacgttggcttactgaggcgcgcaagaagaccgttgttcaaatccccgcccctaccaccgcgaaacagatgcgtgaatttcttggcacggcaggtttctgccgtttgtggattcctggctttgctaccttagcggcacccctctatccactcacgaaagagaaaggagaattctcttgggccccagaacatcagaaagcgtttgacgccatcaagaaagcgttattaagcgctcctgctcttgcattgcccgatgtcaccaaaccattcacgctctacgtggatgaacgcaaaggcgtagcccgcggtgtgttgacacagaccttaggaccttggcgtcgtcccgtggcctacctctcgaagaaacttgacccagttgcaagtggttggcctgtctgcttgcgcgctattgccgcagttgcaatcctcgtcaaagatgccgacaaacttactttgggccagaacattactgttattgcaccacacgcccttgaaaacatcgttcgtcagccacctgatcgctggatgaccaatgctcgcatgacgcattatcaggcgctcttgcttaccgaacgcgtgacttttgctccacctgcagccttaaaccccgcaacccttttacccgaagaaacagatgagcctgtgacgcatgactgtcaccagctcttgattgaagaaactggcgtacgcaaagacctcaccgatattccattaacaggtgaggtacttacgtggtttaccgatgggtcctcttatgtcgtcgaaggcaaacgtatggctggtgccgccgttgttgatggcacccgtactatctgggcaagcagcttacccgaaggcacgagtgctcagaaagcagagttgatggccttgacccaagccttacgccttgctgaagggaaatcgatcaatatttacaccgactcacgctatgcattcgccacggcacatgtacacggtgccatctacaaacaacgtggtttgttaacttctgctggccgcgagattaagaacaaagaagaaatcctttccttacttgaagccttacacctccccaaacgtctcgctattattcattgtccagggcatcagaaagcaaaagatcctatcagccgtgggaatcaaatggcagatcgtgtcgctaaacaggcagcccaaggcgttaacttgttgcccatgattgagacccctaaagctcca

SEQ ID NO: 224 - protein, 687 aa, synthetic construct
  REGION 1..687: note = Engineered reverse transcriptase variants
MHHHHHHGGSGVLTLQLDDEYRLYSPLVKPDQNIQFWLEQFPQAWAETAGMGLAKQVPPQVIQLKASATPVSVRQYPLSKEAQEGIRPHVQRLIQQGILVPVQSPWNTPLLPVRKPGTNDYRPVQDLREVNKRVQDIHPTVPNPYNLLCALPPQRSWYTVLDLKDAFFCLRLHPTSQPLFAFEWRDPDTGRTGQLTWTRLPQGFKNSPTIFDEALHRDLANFRIQHPQVTLLQYVDDLLLAGATKQDCLEGTKALLLELSDLGYRVSAKKAQICRREVTYLGYSLRDGQRWLTEARKKTVVQIPAPTTAKQMREFLGTAGFCRLWIPGFATLAAPLYPLTKEKGEFSWAPEHQKAFDAIKKALLSAPALALPDVTKPFTLYVDERKGVARGVLTQTLGPWRRPVAYLSKKLDPVASGWPVCLRAIAAVAILVKDADKLTLGQNITVIAPHALENIVRQPPDRWMTNARMTHYQALLLTERVTFAPPAALNPATLLPEETDEPVTHDCHQLLIEETGVRKDLTDIPLTGEVLTWFTDGSSYVVEGKRMAGAAVVDGTRTIWASSLPEGTSAQKAELMALTQALRLAEGKSINIYTDSRYAFATAHVHGAIYKQRGLLTSAGREIKNKEEILSLLEALHLPKRLAIIHCPGHQKAKDPISRGNQMADRVAKQAAQGVNLLPMIETPKAP

SEQ ID NO: 225 - DNA, 2061 bp, synthetic construct
  misc_feature 1..2061: note = Engineered reverse transcriptase variants
  source 1..2061: mol_type = other DNA
atgcatcaccatcaccatcatggtggtagcggagtgctgacccttcagctggatgatgaatatcgcttgtacagtccgctggtcaaaccagaccaaaacattcagttctggctcgaacagtttccgcaagcgtgggctgaaactgcaggcatgggcctggccaaacaggttcctcctcaggtaatccaattaaaggcatctgccacgccggtgtcagttcgtcagtatccgctgtcgaaagaagcgcaagaggggattcgcccacacgtgcagcgtttgctgcagcagggcattctggtaccggttcaaagcccctggaataccccgcttttaccagtccgcaaaccgggtacaaacgattaccgtcctgtgcaagacctgcgcgaagtcaataaacgtgtgcaggatatccacccaaccgttccgaacccgtataatctgttgtgcgcgttaccgccgcagcgttcctggtacacggtgctggacctgaaggacgcgttcttctgtcttcgcctccaccccaccagccagccactgtttgcctttgaatggcgcgatcctgatacgggccgtactgggcaattaacatggacccgtttgccgcagggctttaagaacagtcccaccatttttgatgaggctcttcaccgcgacctcgcaaatttccgcatccaacacccacaggtaacgttactccagtatgtcgatgatcttttgttagcgggtgccaccaaacaggactgcttggaaggaacgaaagcacttctcttggaactctcggatttaggttatcgtgtgtccgccaagaaagctcagatttgtcgccgcgaagtgacatacttaggctattcattgcgtgatggtcaacgttggcttactgaggcgcgcaagaagaccgttgttcaaatccccgcccctaccaccgcgaaacagatgcgtgaatttcttggcacggcaggtttctgccgtttgtggattcctggctttgctaccttagcggcacccctctatccactcacgaaagagaaaggagaattctcttgggccccagaacatcagaaagcgtttgacgccatcaagaaagcgttattaagcgctcctgctcttgcgttgcccgatgtcaccaaaccattcacgctctacgtggatgaacgcaaaggcgtagcccgcggtgtgttgacacagaccttaggaccttggcgtcgtcccgtggcctacctctcgaagaaacttgacccagttgcaagtggttggcctgtctgcttgcgcgctattgccgcagttgcaatcctcgtcaaagatgccgacaaacttactttgggccagaacattactgttattgcaccacacgcccttgaaaacatcgttcgtcagccacctgatcgctggatgaccaatgctcgcatgacgcattatcaggcgctcttgcttaccgaacgcgtgacttttgctccacctgcagccttaaaccccgcaacccttttacccgaagaaacagatgagcctgtgacgcatgactgtcaccagctcttgattgaagaaactggcgtacgcaaagacctcaccgatattccattaacaggtgaggtacttacgtggtttaccgatgggtcctcttatgtcgtcgaaggcaaacgtatggctggtgccgccgttgttactggcacccgtactatctgggcaagcagcttacccgaaggcacgagtgctcagaaagcagagttgattgccttgacccaagccttacgccttgctgaagggaaatcgatcaatatttacaccgactcacgctatgcattcgccacggcacatgtacacggtgccatctacaaacaacgtggtttgttaacttctgctggccgcgagattaagaacaaagaagaaatcctttccttacttgaagccttacacctccccaaacgtctcgctattattcattgtccagggcatcagaaagcaaaagatcctatcagccgtgggaatcaaatggcagatcgtgtcgctaaacaggcagcccaaggcgttaacttgttgcccatgattgagacccctaaagctcca

SEQ ID NO: 226 - protein, 687 aa, synthetic construct
  REGION 1..687: note = Engineered reverse transcriptase variants
MHHHHHHGGSGVLTLQLDDEYRLYSPLVKPDQNIQFWLEQFPQAWAETAGMGLAKQVPPQVIQLKASATPVSVRQYPLSKEAQEGIRPHVQRLLQQGILVPVQSPWNTPLLPVRKPGTNDYRPVQDLREVNKRVQDIHPTVPNPYNLLCALPPQRSWYTVLDLKDAFFCLRLHPTSQPLFAFEWRDPDTGRTGQLTWTRLPQGFKNSPTIFDEALHRDLANFRIQHPQVTLLQYVDDLLLAGATKQDCLEGTKALLLELSDLGYRVSAKKAQICRREVTYLGYSLRDGQRWLTEARKKTVVQIPAPTTAKQMREFLGTAGFCRLWIPGFATLAAPLYPLTKEKGEFSWAPEHQKAFDAIKKALLSAPALALPDVTKPFTLYVDERKGVARGVLTQTLGPWRRPVAYLSKKLDPVASGWPVCLRAIAAVAILVKDADKLTLGQNITVIAPHALENIVRQPPDRWMTNARMTHYQALLLTERVTFAPPAALNPATLLPEETDEPVTHDCHQLLIEETGVRKDLTDIPLTGEVLTWFTDGSSYVVEGKRMAGAAVVTGTRTIWASSLPEGTSAQKAELIALTQALRLAEGKSINIYTDSRYAFATAHVHGAIYKQRGLLTSAGREIKNKEEILSLLEALHLPKRLAIIHCPGHQKAKDPISRGNQMADRVAKQAAQGVNLLPMIETPKAP

SEQ ID NO: 227 - DNA, 2061 bp, synthetic construct
  misc_feature 1..2061: note = Engineered reverse transcriptase variants
  source 1..2061: mol_type = other DNA
atgcatcaccatcaccatcatggtggtagcggagtgctgacccttcagctggatgatgaatatcgcttgtacagtccgctggtcaaaccagaccaaaacattcagttctggctcgaacagtttccgcaagcgtgggctgaaactgcaggcatgggcctggccaaacaggttcctcctcaggtaatcccgttaaaggcatctgcgacgccggtgtcagttcgtcagtatccgctgtcgaaagaggcgcaagaggggattcgcccacacgtgcagcgtttgatccagcagggcattctggtaccggttcaaagcccctggaataccccgcttttaccagtccgcaaaccgggtacaaacgattaccgtcctgtgcaagacctgcgcgaagtcaataaacgtgtgcaggatatccacccaaccgttccgaacccgtataatctgttgtgcgcgttaccgccgcagcgttcctggtacacggtgctggacctgaaggacgcgttcttctgtcttcgcctccaccccaccagccagccactgtttgcctttgaatggcgcgatcctgatacgggccgtactgggcaattaacatggacccgtttgccgcagggctttaagaacagtcccaccatttttgatgaggctcttcaccgcgacctcgcaaatttccgcatccaacacccacaggtaacgttactccagtatgtcgatgatcttttgttagcgggtgccaccaaacaggactgcttggaaggaacgaaagcacttctcttggaactctcggatttaggttatcgtgtgtccgccaagaaagctcagatttgtcgccgcgaagtgacatacttaggctattcattgcgtgatggtcaacgttggcttactgaggcgcgcaagcgcaccgttgttcaaatccccgcccctaccaccgcgaaacagatgcgtgaatttcttggcacggcaggtttctgccgtttgtggattcctggctttgctaccttagcggcacccctctatccactcacgaaagagaaaggagaattctcttgggccccagaacatcagaaagcgtttgacgccatcaagaaagcgttattaagcgctcctgctcttgcattgcccgatgtcaccaaaccattcacgctctacgtggatgaacgcaaaggcgtagcccgcggtgtgttgacacagaccttaggaccttggcgtcgtcccgtggcctacctctcgaagaaacttgacccagttgcaagtggttggcctgtctgcttgaaagctattgccgcagttgcaatcctcgtcaaagatgccgacaaacttactttgggccagaacattactgttcgcgcaccacacgcccttgaaaacatcgttcgtcagccacctgatcgctggatgaccaatgctcgcatgacgcattatcagagcctcttgcttaccgaacgcgtgacttttgctccacctgcagccttaaaccccgcaacccttttacccgaagaaacagatgagcctgtgacgcatgactgtcaccagctcttgattgaagaaactggcgtacgcaaagacctcaccgatattccattaacaggtgaggtacttacgtggtttaccgatgggtcctcttatgtcgtcgaaggcaaacgtatggctggtgccgccgttgttgatggcacccgtactatctgggcaagcagcttacccgaaggcacgagtgctcagaaagcacaattgatggccttgacccaagccttacgccttgctgaagggaaatcgatcaatatttacaccgactcacgctatgcattcgccacggcacatgtacacggtgccatctacaaacaacgtggtttgttaacttctgctggccgcgagattaagaacaaagaagaaatcctttccttacttgaagccttacacctccccaaacgtctcgctattattcattgtccagggcatcagaaagcaaaagatcctatcagccgtgggaatcaaatggcagatcgtgtcgctaaacaggcagcccaaggcgttaacttgttgcccatgattgagacccctaaagctcca

SEQ ID NO: 228 - protein, 687 aa, synthetic construct
  REGION 1..687: note = Engineered reverse transcriptase variants
MHHHHHHGGSGVLTLQLDDEYRLYSPLVKPDQNIQFWLEQFPQAWAETAGMGLAKQVPPQVIPLKASATPVSVRQYPLSKEAQEGIRPHVQRLIQQGILVPVQSPWNTPLLPVRKPGTNDYRPVQDLREVNKRVQDIHPTVPNPYNLLCALPPQRSWYTVLDLKDAFFCLRLHPTSQPLFAFEWRDPDTGRTGQLTWTRLPQGFKNSPTIFDEALHRDLANFRIQHPQVTLLQYVDDLLLAGATKQDCLEGTKALLLELSDLGYRVSAKKAQICRREVTYLGYSLRDGQRWLTEARKRTVVQIPAPTTAKQMREFLGTAGFCRLWIPGFATLAAPLYPLTKEKGEFSWAPEHQKAFDAIKKALLSAPALALPDVTKPFTLYVDERKGVARGVLTQTLGPWRRPVAYLSKKLDPVASGWPVCLKAIAAVAILVKDADKLTLGQNITVRAPHALENIVRQPPDRWMTNARMTHYQSLLLTERVTFAPPAALNPATLLPEETDEPVTHDCHQLLIEETGVRKDLTDIPLTGEVLTWFTDGSSYVVEGKRMAGAAVVDGTRTIWASSLPEGTSAQKAQLMALTQALRLAEGKSINIYTDSRYAFATAHVHGAIYKQRGLLTSAGREIKNKEEILSLLEALHLPKRLAIIHCPGHQKAKDPISRGNQMADRVAKQAAQGVNLLPMIETPKAP

SEQ ID NO: 229 - DNA, 2061 bp, synthetic construct
  misc_feature 1..2061: note = Engineered reverse transcriptase variants
  source 1..2061: mol_type = other DNA
atgcatcaccatcaccatcatggtggtagcggagtgctgacccttcagctggatgatgaatatcgcttgtacagtccgctggtcaaaccagaccaaaacattcagttctggctcgaacagtttccgcaagcgtgggctgaaactggtggcatgggcctggccaaacaggttcctcctcaggtaatcctgttaaaggcatctgccacgccggtgtcagttcgtcagtatccgctgtcgaaagaagcgcaagaggggattcgcccacacattcagcgtttgatccagcagggcattctggtaccggttcaaagcccctggaataccccgcttttaccagtccgtaaaccgggtacaaacgattaccgtcctgtgcaagacctgcgcgaagtcaataaacgtgtgcaggatatccacccaaccgttccgaacccgtataatctgttgtgcgcgttaccgccgcagcgttcctggtacacggtgctggacctgaaggacgcgttcttctgtcttcgcctcgcacccaccagccagccactgtttgcctttgaatggcgcgatcctgatacgggccgtactgggcaattaacatggacccgtttgccgcagggctttaagaacagtcccaccatttttgatgaggctcttcatcgcgacctcgcaaatttccgcatccaacacccacaggtaacgttactccagtatgtcgatgatcttttgttagcgggtgccaccaaacaggactgcttggaaggaacgaaagcacttctcttggaactctcggatttaggttatcgtgtgtcagccaagaaagctcagatttgtcgccgcgaagtgacatacttaggctattcattgcgtgatggtcaacgttggcttactgaggcgcgcaagaagaccgttgttcaaatccccgcccctaagaccgcgaaacagatgcgtgaatttcttggcacggcaggtgcgtgccgtttgtggattcctggctttgctgaattagcggcacccctctatccactcacgaaagagaaaggagaattctcttgggctccagaacatcagaaagcgtttgacgccatcaagaaagcgttattaagcgctcctgctcttgcattgcccgatgtcaccaaaccattcacgctctacgtggatgaacgcaaaggcgtagcccgcggtgtgttgacacagaccttaggaccttggcgtcgtcccgtggcctacctctcgaagaaacttgacccagttgcaagtggttggcctgtctgcttgaaagctattgccgcagttgcaatcctcgtcaaagatgccgacaaacttactttgggccagaacattactgttattgcaccacacgcccttgaaaacatcgttcgtcagccacctgatcgctggatgaccaatgctcgcatgacgcattatcagagcctcttgcttaccgaacgcgtgacttttgctccacctgcagccttaaaccccgcaacccttttacccgaagaaacagatgagcctgtgacgcatgactgtcaccagctcttgattgaagaaactggcgtacgcaaagacctcaccgatattccattaacaggtgaggtacttacgtggtttaccgacgggtcctcttatgtcgtcgaaggcaaacgtatggctggtgccgccgttgttgatggcacccgtactatctgggcaagcagcttacccgaaggcacgagtgctcagaaagcagatttgatggccttgacccaagccttacgccttgctgaagggaaatcgatcaatatttacaccaactcacgctatgcattcgccacggcacatgtacacggtgccatctacaaacaacgtggtttgttaacttctgctggccgcgagattaagaacaaagaagaaatcctttccttacttgaagccttacacctccccaaacgtctcgctattattcattgtccagggggtcagaaagcaaaagatcctatcagccgtgggaatcaaatggcagatcgtgtcgctaaacaggcagcccaaggcgttaacttgttgcccatgattgagacccctaaagctcca

SEQ ID NO: 230 - protein, 687 aa, synthetic construct
  REGION 1..687: note = Engineered reverse transcriptase variants
MHHHHHHGGSGVLTLQLDDEYRLYSPLVKPDQNIQFWLEQFPQAWAETGGMGLAKQVPPQVILLKASATPVSVRQYPLSKEAQEGIRPHIQRLIQQGILVPVQSPWNTPLLPVRKPGTNDYRPVQDLREVNKRVQDIHPTVPNPYNLLCALPPQRSWYTVLDLKDAFFCLRLAPTSQPLFAFEWRDPDTGRTGQLTWTRLPQGFKNSPTIFDEALHRDLANFRIQHPQVTLLQYVDDLLLAGATKQDCLEGTKALLLELSDLGYRVSAKKAQICRREVTYLGYSLRDGQRWLTEARKKTVVQIPAPKTAKQMREFLGTAGACRLWIPGFAELAAPLYPLTKEKGEFSWAPEHQKAFDAIKKALLSAPALALPDVTKPFTLYVDERKGVARGVLTQTLGPWRRPVAYLSKKLDPVASGWPVCLKAIAAVAILVKDADKLTLGQNITVIAPHALENIVRQPPDRWMTNARMTHYQSLLLTERVTFAPPAALNPATLLPEETDEPVTHDCHQLLIEETGVRKDLTDIPLTGEVLTWFTDGSSYVVEGKRMAGAAVVDGTRTIWASSLPEGTSAQKADLMALTQALRLAEGKSINIYTNSRYAFATAHVHGAIYKQRGLLTSAGREIKNKEEILSLLEALHLPKRLAIIHCPGGQKAKDPISRGNQMADRVAKQAAQGVNLLPMIETPKAP

SEQ ID NO: 231 - DNA, 2061 bp, synthetic construct
  misc_feature 1..2061: note = Engineered reverse transcriptase variants
  source 1..2061: mol_type = other DNA
atgcatcaccatcaccatcatggtggtagcggagtgctgacccttcagctggatgatgaatatcgcttgtacagtccgctggtcaaaccagaccaaaacattcagttctggctcgaacagtttccgcaagcgtgggctgaaactggtggcatgggcctggccaaacaggttcctcctcaggtaatccaattaaaggcatctgccacgccggtgtcagttcgtcagtatccgctgtcgaaagaagcgcaagaggggattcgcccacacattcagcgtttgatccagcagggcattctggtaccggttcaaagcccctggaataccccgcttttaccagtccgtaaaccgggtacaaacgattaccgtcctgtgcaagacctgcgcgaagtcaataaacgtgtgcaggatatccacccaaccgttccgaacccgtataatctgttgtgcgcgttaccgccgcagcgttcctggtacacggtgctggacctgaaggacgcgttcttctgtcttcgcctccatcccaccagccagccactgtttgcctttgaatggcgcgatcctgatacgggccgtactgggcaattaacatggacccgtttgccgcagggctttaagaacagtcccaccatttttgatgaggctcttcaccgcgacctcgcaaatttccgcatccaacacccacaggtaacgttactccagtatgtcgatgatcttttgttagcgggtgccaccaaacaggactgcttggaaggaacgaaagcacttctcttggaactctcggatttaggttatcgtgtgtccgccaagaaagctcagatttgtcgccgcgaagtgacatacttaggctattcattgcgtgatggtcaacgttggcttactgaggcgcgcaagaagaccgttgttcaaatccccgcccctacgaccgcgaaacagatgcgtgaatttcttggcacggcaggtttctgccgtttgtggattcctggctttgctaccttagcggcacccctctatccactcacgaaagagaaaggagaattctcttgggccccagaacatcagaaagcgtttgacgccatcaagaaagcgttattaagcgctcctgctcttgcattgcccgatgtcaccaaaccattcacgctctacgtggatgaacgcaaaggcgtagcccgcggtgtgttgacacagaccttaggaccttggcgtcgtcccgtggcctacctctcgaagaaacttgacccagttgcaagtggttggcctgtctgcttgaaagctattgccgcagttgcaatcctcgtcaaagatgccgacaaacttactttgggccagaacattactgttattgcaccacacgcccttgaaaacatcgttcgtcagccacctgatcgctggatgaccaatgctcgcatgacgcattatcagagcctcttgcttaccgaacgcgtgacttttgctccacctgcagccttaaaccccgcaacccttttacccgaagaaacagatgagcctgtgacgcatgactgtcaccagctcttgattgaagaaactggcgtacgcaaagacctcaccgatattccattaacaggtgaggtacttacgtggtttaccgaggggtcctcttatgtcgtcgaaggcaaacgtatggctggtgccgccgttgttgatggcacccgtactatctgggcaagcagcttacccgaaggcacgagtgctcagaaagcagatttgatggccttgacccaagccttacgccttgctgaagggaaatcgatcaatatttacaccgactcacgctatgcattcgccacggcacatgtacacggtgccatctacaaacaacgtggtttgttaacttctgctggccgcgagattaagaacaaagaagaaatcctttccttacttgaagccttacacctccccaaacgtctcgctattattcattgtccagggcatcagaaagcaaaagatcctatcagccgtgggaatcaaatggcagatcgtgtcgctaaacaggcagcccaaggcgttaacttgttgcccatgattgagacccctaaagctcca

SEQ ID NO: 232 - protein, 687 aa, synthetic construct
  REGION 1..687: note = Engineered reverse transcriptase variants
MHHHHHHGGSGVLTLQLDDEYRLYSPLVKPDQNIQFWLEQFPQAWAETGGMGLAKQVPPQVIQLKASATPVSVRQYPLSKEAQEGIRPHIQRLIQQGILVPVQSPWNTPLLPVRKPGTNDYRPVQDLREVNKRVQDIHPTVPNPYNLLCALPPQRSWYTVLDLKDAFFCLRLHPTSQPLFAFEWRDPDTGRTGQLTWTRLPQGFKNSPTIFDEALHRDLANFRIQHPQVTLLQYVDDLLLAGATKQDCLEGTKALLLELSDLGYRVSAKKAQICRREVTYLGYSLRDGQRWLTEARKKTVVQIPAPTTAKQMREFLGTAGFCRLWIPGFATLAAPLYPLTKEKGEFSWAPEHQKAFDAIKKALLSAPALALPDVTKPFTLYVDERKGVARGVLTQTLGPWRRPVAYLSKKLDPVASGWPVCLKAIAAVAILVKDADKLTLGQNITVIAPHALENIVRQPPDRWMTNARMTHYQSLLLTERVTFAPPAALNPATLLPEETDEPVTHDCHQLLIEETGVRKDLTDIPLTGEVLTWFTEGSSYVVEGKRMAGAAVVDGTRTIWASSLPEGTSAQKADLMALTQALRLAEGKSINIYTDSRYAFATAHVHGAIYKQRGLLTSAGREIKNKEEILSLLEALHLPKRLAIIHCPGHQKAKDPISRGNQMADRVAKQAAQGVNLLPMIETPKAP

SEQ ID NO: 233 - DNA, 2061 bp, synthetic construct
  misc_feature 1..2061: note = Engineered reverse transcriptase variants
  source 1..2061: mol_type = other DNA
atgcatcaccatcaccatcatggtggtagcggagtgctgacccttcagctggatgatgaatatcgcttgtacagtccgctggtcaaaccagaccaaaacattcagttctggctcgaacagtttccgcaagcgtgggctgaaactgctggcatgggcctggccaaacaggttcctcctcaggtaatccaattaaaggcatctgccacgccggtgtcagttcgtcagtatccgctgtcgaaagaagcgcaagaggggattcgcccacacgtgcagcgtttgatccagcagggcattctggtaccggttcaaagcccctggaataccccgcttttaccagtccgcaaaccgggtacaaacgattaccgtcctgtgcaagacctgcgcgaagtcaataaacgtgtgcaggatatccacccaaccgttccgaacccgtataatctgttgtgcgcgttaccgccgcagcgttcctggtacacggtgctggacctgaaggacgcgttcttctgtcttcgcctccaccccaccagccagccactgtttgcctttgaatggcgcgatcctgatacgggccgtactgggcaattaacatggacccgtttgccgcagggctttaagaacagtcccaccatttttgatgaggctcttcaccgcgacctcgcaaatttccgcatccaacacccacaggtaacgttactccagtatgtcgatgatcttttgttagcgggtgccaccaaacaggactgcttggaaggaacgaaagcacttctcttggaactctcggatttaggttatcgtgtgtccgccaagaaagctcagatttgtcgccgcgaagtgacatacttaggctattcattgcgtgatggtcaacgttggcttactgaggcgcgcaagaagaccgttgttcaaatccccgcccctaccaccgcgaagcagatgcgtgaatttcttggcacggcaggtttctgccgtttgtggattcctggctttgctaccttagcggcacccctctatccactcacgaaagagaaaggagaattctcttgggccccagaacatcagaaagcgtttgacgccatcaagaaagcgttattaagcgctcctgctcttgcattgcccgatgtcaccaaaccattcacgctctacgtggatgaacgcaaaggcgtagcccgcggtgtgttgacacagaccttaggaccttggcgtcgtcccgtggcctacctctcgaagaaacttgacccagttgcaagtggttggcctgtctgcttgaaagctattgccgcagttgcaatcctcgtcaaagatgccgacaaacttactttgggccagaacattactgttattgcaccacacgcccttgaaaacatcgttcgtcagccacctgatcgctggatgaccaatgctcgcatgacgcattatcagagcctcttgcttaccgaacgcgtgacttttgctccacctgcagccttaaaccccgcaacccttttacccgaagaaacagatgagcctgtgacgcatgactgtctgcagctcttgattgaagaaactggcgtacgcaaagacctcaccgatattccattaacaggtgaggtacttacgtggtttaccgatgggtcctcttatgtcgtcgaaggcaaacgtatggctggtgccgccgttgttgatggcacccgtactatctgggcaagcagcttacccgaaggcacgagtgctcagaaagcagagttgatggccttgacccaagccttacgccttgctgaagggaaatcgatcaatatttacaccgactcacgctatgcattcgccacggcacatgtacacggtgccatctacaaacaacgtggtttgttaacttctgctggccgcgagattaagaacaaagaagaaatcctttccttacttgaagccttacacctccccaaacgtctcgctattattcattgtccagggcatcagaaagcaaaagatcctatcagccgtgggaatcagatggcagatcgtgtcgctaaacaggcagcccaaggcgttaacttgttgcccatgattgagacccctaaagctcca

SEQ ID NO: 234 - protein, 687 aa, synthetic construct
  REGION 1..687: note = Engineered reverse transcriptase variants
MHHHHHHGGSGVLTLQLDDEYRLYSPLVKPDQNIQFWLEQFPQAWAETAGMGLAKQVPPQVIQLKASATPVSVRQYPLSKEAQEGIRPHVQRLIQQGILVPVQSPWNTPLLPVRKPGTNDYRPVQDLREVNKRVQDIHPTVPNPYNLLCALPPQRSWYTVLDLKDAFFCLRLHPTSQPLFAFEWRDPDTGRTGQLTWTRLPQGFKNSPTIFDEALHRDLANFRIQHPQVTLLQYVDDLLLAGATKQDCLEGTKALLLELSDLGYRVSAKKAQICRREVTYLGYSLRDGQRWLTEARKKTVVQIPAPTTAKQMREFLGTAGFCRLWIPGFATLAAPLYPLTKEKGEFSWAPEHQKAFDAIKKALLSAPALALPDVTKPFTLYVDERKGVARGVLTQTLGPWRRPVAYLSKKLDPVASGWPVCLKAIAAVAILVKDADKLTLGQNITVIAPHALENIVRQPPDRWMTNARMTHYQSLLLTERVTFAPPAALNPATLLPEETDEPVTHDCLQLLIEETGVRKDLTDIPLTGEVLTWFTDGSSYVVEGKRMAGAAVVDGTRTIWASSLPEGTSAQKAELMALTQALRLAEGKSINIYTDSRYAFATAHVHGAIYKQRGLLTSAGREIKNKEEILSLLEALHLPKRLAIIHCPGHQKAKDPISRGNQMADRVAKQAAQGVNLLPMIETPKAP

SEQ ID NO: 235 - DNA, 2061 bp, synthetic construct
  misc_feature 1..2061: note = Engineered reverse transcriptase variants
  source 1..2061: mol_type = other DNA
atgcatcaccatcaccatcatggtggtagcggagtgctgacccttcagctggatgatgaatatcgcttgtacagtccgctggtcaaaccagaccaaaacattcagttctggctcgaacagtttccgcaagcgtgggctgaaactgcaggcatgggcctggccaaacaggttcctcctcaggtaatcccgttaaaggcatctgcgacgccggtgtcagttcgtcagtatccgctgtcgaaaaaggcgcaagaggggattcgcccacacgtgcagcgtttgatccagcagggcattctggtaccggttcaaagcccctggaataccccgcttttaccagtccgcaaaccgggtacaaacgattaccgtcctgtgcaagacctgcgcgaagtcaataaacgtgtgcaggatatccacccaaccgttccgaacccgtataatctgttgtgcgcgttaccgccgcagcgttcctggtacacggtgctggacctgaaggacgcgtacttctgtcttcgcctccaccccaccagccagccactgtttgcctttgaatggcgcgatcctgatacgggccgtactgggcaattaacatggacccgtttgccgcagggctttaagaacagtcccaccatttttgatgaggctcttcaccgcgacctcgcaaatttccgcatccaacacccacaggtaacgttactccagtatgtcgatgatcttttgttagcgggtgccaccaaacaggactgcttggaaggaacgaaagcacttctcttgaccctctcgaacttaggttatcgtgtgtccgccaagaaagctcagatttgtcgccgcgaagtgacatacttaggctattcattgcgtgatggtcaacgttggcttactgaggcgcgcaagcgcaccgttgttcaacagcccgcccctaccaccgcgaaacagatgcgtgaatttcttggcacggcaggtttctgccgtttgtggattcctggctttgctaccttagcggcacccctctatccactcacgaaagagaaaggagaattctcttgggccccagaacatcagaaagcgtttgacgccatcaagaaagcgttattaagcgctcctgctcttgcattgcccgatgtcaccaaaccattcacgctctacgtggatgaacgcaaaggcgtagcccgcggtgtgttgacacagaccttaggaccttggcgtcgtcccgtggcctacctctcgaagaaacttgacccagttgcaagtggttggcctgtctgcttgaaagctattgccgcagttgcaatcctcgtcaaagatgccgacaaacttactttgggccagaacattactgttggcgcaccacacgcccttgaaaacatcgttcgtcagccacctgatcgctggatgaccaatgctcgcatgacgcattatcagagcctcttgcttaccgaacgcgtgacttttgctccacctgcagccttaaaccccgcaacccttttacccgaagaaacagatgagcctgtgacgcatgactgtcaccagctcttgattgaagaaactggcgtacgcaaagacctcaccgatattccattaacaggtgaggtacttacgtggtttaccgacgggtcctcttatgtcgtcgaaggcaaacgtatggctggtgccgccgttgttgatggcacccgtactatctgggcaagcagcttacccgaaggcacgagtgctcagaaagcagagttgatggccttgacccaagccttacgccttgctgaagggaaatcgatcaatatttacaccgactcacgctatgcattcgccacggcacatgtacacggtgccatctacaaacaacgtggtttgttaacttctgctggccgcgagattaagaacaaagaagaaatcctttccttacttgaagccttacacctccccaaacgtctcgctattattcattgtccagggcatcagaaagcaaaagatcctatcagccgtgggaatcaaatggcagatcgtgtcgctaaacaggcagcccaaggcgttaacttgttgcccatgattgagacccctaaagctcca

SEQ ID NO: 236 - protein, 687 aa, synthetic construct
  REGION 1..687: note = Engineered reverse transcriptase variants
MHHHHHHGGSGVLTLQLDDEYRLYSPLVKPDQNIQFWLEQFPQAWAETAGMGLAKQVPPQVIPLKASATPVSVRQYPLSKKAQEGIRPHVQRLIQQGILVPVQSPWNTPLLPVRKPGTNDYRPVQDLREVNKRVQDIHPTVPNPYNLLCALPPQRSWYTVLDLKDAYFCLRLHPTSQPLFAFEWRDPDTGRTGQLTWTRLPQGFKNSPTIFDEALHRDLANFRIQHPQVTLLQYVDDLLLAGATKQDCLEGTKALLLTLSNLGYRVSAKKAQICRREVTYLGYSLRDGQRWLTEARKRTVVQQPAPTTAKQMREFLGTAGFCRLWIPGFATLAAPLYPLTKEKGEFSWAPEHQKAFDAIKKALLSAPALALPDVTKPFTLYVDERKGVARGVLTQTLGPWRRPVAYLSKKLDPVASGWPVCLKAIAAVAILVKDADKLTLGQNITVGAPHALENIVRQPPDRWMTNARMTHYQSLLLTERVTFAPPAALNPATLLPEETDEPVTHDCHQLLIEETGVRKDLTDIPLTGEVLTWFTDGSSYVVEGKRMAGAAVVDGTRTIWASSLPEGTSAQKAELMALTQALRLAEGKSINIYTDSRYAFATAHVHGAIYKQRGLLTSAGREIKNKEEILSLLEALHLPKRLAIIHCPGHQKAKDPISRGNQMADRVAKQAAQGVNLLPMIETPKAP

SEQ ID NO: 237 - DNA, 2061 bp, synthetic construct
  misc_feature 1..2061: note = Engineered reverse transcriptase variants
  source 1..2061: mol_type = other DNA
atgcatcaccatcaccatcatggtggtagcggagtgctgacccttcagctggatgatgaatatcgcttgtacagtccgctggtcaaaccagaccaaaacattcagttctggctcgaacagtttccgcaagcgtgggctgaaactgctggcatgggcctggccaaacaggttcctcctcaggtaatccaattaaaggcatctgccacgccggtgtcagttcgtcagtatccgctgtcgaaagaagcgcaagaggggattcgcccacacgtgcagcgtttgatccagcagggcattctggtaccggttcaaagcccctggaataccccgcttttaccagtcaaaaaaccgggtacaaacgattaccgtcctgtgcaagacctgcgcgaagtcaataaacgtgtgcaggatatccacccaaccgttccgaacccgtataatctgttgtgcgcgttaccgccgcagcgttcctggtacacggtgctggacctgaaggacgcgttcttctgtcttcgcctccaccccaccagccagccactgtttgcctttgaatggcgcgatcctgatacgggccgtactgggcaattaacatggacccgtttgccgcagggctttaagaacagtcccaccatttttgatgaggctcttcaccgcgacctcgcaaatttccgcatccaacacccacaggtaacgttactccagtatgtcgatgatcttttgttagcgggtgccaccaaacaggactgcttggaaggaacgaaagcacttctcttggaactctcggatttaggttatcgtgtgtccgccaagaaagctcagatttgtcgccgcgaagtgacatacttaggctattcattgcgtgatggtcaacgttggcttactgaggcgcgcaagaagaccgttgttcaaatccccgcccctacgaccgcgaaacagatgcgtgaatttcttggcacggcaggtttctgccgtttgtggattcctggctttgctgaattagcggcacccctctatccactcacgaaagagaaaggagaattctcttgggccccagaacatcagaaagcgtttgacgccatcaagaaagcgttattaagcgctcctgctcttgcattgcccgatgtcaccaaaccattcacgctctacgtggatgaacgcaaaggcgtagcccgcggtgtgttgacacagaccttaggaccttggcgtcgtcccgtggcctacctctcgaagaaacttgacccagttgcaagtggttggcctgtctgcttgaaagctattgccgcagttgcaatcctcgtcaaagatgccgacaaacttactttgggccagaacattactgttattgcaccacacgcccttgaaaacatcgttcgtcagccacctgatcgctggatgaccaatgctcgcatgacgcattatcagagcctcttgcttaccgaacgcgtgacttttgctccacctgcagccttaaaccccgcaacccttttacccgaagaaacagatgagcctgtgacgcatgactgtcaccagctcttgattgaagaaactggcgtacgcaaagacctcaccgatattccattaacaggtgaggtacttacgtggtttaccgacgggtcctcttatgtcgtcgaaggcaaacgtatggctggtgccgccgttgttgatggcacccgtactatctgggcaagcagcttacccgaaggcacgagtgctcagaaagcagagttgatggccttgacccaagccttacgccttgctgaagggaaatcgatcaatatttacaccgactcacgctatgcattcgccacggcacatgtacacggtgccatctacaaacaacgtggtttgttaacttctgctggccgcgagattaagaacaaagaagaaatcctttccttacttgaagccttacacctccccaaacgtctcgctattattcattgtccagggcatcagaaagcaaaagatcctatcagccgtgggaatcaaatggcagatcgtgtcgctaaacaggcagcccaaggcgttaacttgttgcccatgattgagacccctaaagctcca

SEQ ID NO: 238 - protein, 687 aa, synthetic construct
  REGION 1..687: note = Engineered reverse transcriptase variants
MHHHHHHGGSGVLTLQLDDEYRLYSPLVKPDQNIQFWLEQFPQAWAETAGMGLAKQVPPQVIQLKASATPVSVRQYPLSKEAQEGIRPHVQRLIQQGILVPVQSPWNTPLLPVKKPGTNDYRPVQDLREVNKRVQDIHPTVPNPYNLLCALPPQRSWYTVLDLKDAFFCLRLHPTSQPLFAFEWRDPDTGRTGQLTWTRLPQGFKNSPTIFDEALHRDLANFRIQHPQVTLLQYVDDLLLAGATKQDCLEGTKALLLELSDLGYRVSAKKAQICRREVTYLGYSLRDGQRWLTEARKKTVVQIPAPTTAKQMREFLGTAGFCRLWIPGFAELAAPLYPLTKEKGEFSWAPEHQKAFDAIKKALLSAPALALPDVTKPFTLYVDERKGVARGVLTQTLGPWRRPVAYLSKKLDPVASGWPVCLKAIAAVAILVKDADKLTLGQNITVIAPHALENIVRQPPDRWMTNARMTHYQSLLLTERVTFAPPAALNPATLLPEETDEPVTHDCHQLLIEETGVRKDLTDIPLTGEVLTWFTDGSSYVVEGKRMAGAAVVDGTRTIWASSLPEGTSAQKAELMALTQALRLAEGKSINIYTDSRYAFATAHVHGAIYKQRGLLTSAGREIKNKEEILSLLEALHLPKRLAIIHCPGHQKAKDPISRGNQMADRVAKQAAQGVNLLPMIETPKAP

SEQ ID NO: 239 - DNA, 2061 bp, synthetic construct
  misc_feature 1..2061: note = Engineered reverse transcriptase variants
  source 1..2061: mol_type = other DNA
atgcatcaccatcaccatcatggtggtagcggagtgctgacccttcagctggatgatgaatatcgcttgtacagtccgctggtcaaaccagaccaaaacattcagttctggctcgaacagtttccgcaagcgtgggctgaaactgcaggcatgggcctggccaaacaggttcctcctcaggtaatccaattaaaggcatctgccacgccggtgtcagttcgtcagtatccgctgtcgaaagaagcgcaagaggggattcgcccacacgtgcagcgtttgatccagcagggcattctggtaccggttcaaagcccctggaataccccgcttttaccagtccgcaaaccgggtacaaacgattaccgtcctgtgcaagacctgcgcgaagtcaataaacgtgtgcaggatatccacccaaccgttccgaacccgtataatctgttgtgcgcgttaccgccgcagcgttcctggtacacggtgctggacctgaaggacgcgttcttctgtcttcgcctccaccccaccagccagccactgtttgcctttgaatggcgcgatcctgatacgggccgtactgggcaattaacatggacccgtttgccgcagggctttaagaacagtcccaccatttttaacgaggctcttcaccgcgacctcgcaaatttccgcatccaacacccacaggtaacgttactccagtatgtcgatgatcttttgttagcgggtgccaccaaacaggactgcttggaaggaacgaaagcacttctcttggaactctcggatttaggttatcgtgtgtccgccaagaaagctcagatttgtcgccgcgaagtgacatacttaggctattcattgcgtgatggtcaacgttggcttactgaggcgcgcaaggagaccgttgttcaaatccccgcccctaccaccgcgaaacagatgcgtgaatttcttggcacggcaggtttctgccgtttgtggattcctggctttgctaccttagcggcacccctctatccactcacgaaagagaaaggagaattctcttgggccccagaacatcagaaagcgtttgacgccatcaagaaagcgttattaagcgctcctgctcttgcattgcccgatgtcaccaaaccattcacgctctacgtggatgaacgcaaaggcgtagcccgcggtgtgttgacacagaccttaggaccttggcgtcgtcccgtggcctacctctcgaagaaacttgacccagttgcaagtggttggcctgtctgcttgaaagctattgccgcagttgcaatcctcgtcaaagatgccgacaaacttactttgggccagaacattactgttattgcaccacacgcccttgaaaacatcgttcgtcagccacctgatcgctggatgaccaatgctcgcatgacgcattatcagagcctcttgcttaccgaacgcgtgacttttgctccacctgcagccttaaaccccgcaacccttttacccgaagaaacagatgagcctgtgacgcatgactgtcaccagctcttgattgaagaaactggcgtacgcaaagacctcaccgatattccattaacaggtgaggtacttacgtggtttaccgacgggtcctcttatgtcgtcgaaggcaaacgtatggctggtgccgccgttgttgatggcacccgtactatctgggcaagcagcttacccgaaggcacgagtgctcagaaagcagagttgatggccttgacccaagccttaaaacttgctgaagggaaatcgatcaatatttacaccgactcacgctatgcattcgccacggcacatgtaaaaggtgccatctacaaacaacgtggtttgttaacttctgctggccgcgagattaagaacaaagaagaaatcctttccttacttgaagccttacacctccccaaacgtctcgctattattcattgtccagggcatcagaaagcaaaagatcctatcagccgtgggaatcaaatggcagatcgtgtcgctaaacaggcagcccaaggcgttaacttgttgcccatgattgagacccctaaagctcca

SEQ ID NO: 240 - protein, 687 aa, synthetic construct
  REGION 1..687: note = Engineered reverse transcriptase variants
MHHHHHHGGSGVLTLQLDDEYRLYSPLVKPDQNIQFWLEQFPQAWAETAGMGLAKQVPPQVIQLKASATPVSVRQYPLSKEAQEGIRPHVQRLIQQGILVPVQSPWNTPLLPVRKPGTNDYRPVQDLREVNKRVQDIHPTVPNPYNLLCALPPQRSWYTVLDLKDAFFCLRLHPTSQPLFAFEWRDPDTGRTGQLTWTRLPQGFKNSPTIFNEALHRDLANFRIQHPQVTLLQYVDDLLLAGATKQDCLEGTKALLLELSDLGYRVSAKKAQICRREVTYLGYSLRDGQRWLTEARKETVVQIPAPTTAKQMREFLGTAGFCRLWIPGFATLAAPLYPLTKEKGEFSWAPEHQKAFDAIKKALLSAPALALPDVTKPFTLYVDERKGVARGVLTQTLGPWRRPVAYLSKKLDPVASGWPVCLKAIAAVAILVKDADKLTLGQNITVIAPHALENIVRQPPDRWMTNARMTHYQSLLLTERVTFAPPAALNPATLLPEETDEPVTHDCHQLLIEETGVRKDLTDIPLTGEVLTWFTDGSSYVVEGKRMAGAAVVDGTRTIWASSLPEGTSAQKAELMALTQALKLAEGKSINIYTDSRYAFATAHVKGAIYKQRGLLTSAGREIKNKEEILSLLEALHLPKRLAIIHCPGHQKAKDPISRGNQMADRVAKQAAQGVNLLPMIETPKAP

SEQ ID NO: 241 - DNA, 2061 bp, synthetic construct
  misc_feature 1..2061: note = Engineered reverse transcriptase variants
  source 1..2061: mol_type = other DNA
atgcatcaccatcaccatcatggtggtagcggagtgctgacccttcagctggatgatgaatatcgcttgtacagtccgctggtcaaaccagaccaaaacattcagttctggctcgaacagtttccgcaagcgtgggctgaaactggtggcatgggcctggccaaacaggttcctcctcaggtaatccaattaaaggcatctgccacgccggtgtcagttcgtcagtatccgctgtcgaaagaagcgcaagaggggattcgcccacacgtgcagcgtttgatccagcagggcattctggtaccggttcaaagcccctggaataccccgcttttaccagtccgcaaaccgggtacaaacgattaccgtcctgtgcaagacctgcgcgaagtcaataaacgtgtgcaggatatccacccaaccgttccgaacccgtataatctgttgtgcgcgttaccgccgcagcgttcctggtacacggtgctggacctgaaggacgcgttcttctgtcttcgcctcgcacccaccagccagccactgtttgcctttgaatggcgcgatcctgatacgggccgtactgggcaattaacatggacccgtttgccgcagggctttaagaacagtcccaccatttttgatgaggctcttcaccgcgacctcgcaaatttccgcatccaacacccacaggtaacgttactccagtatgtcgatgatcttttgttagcgggtgccaccaaacaggactgcttggaaggaacgaaagcacttctcttggaactctcggatttaggttatcgtgtgtccgccaagaaagctcagatttgtcgccgcgaagtgacatacttaggctattcattgcgtgatggtcaacgttggcttactgaggcgcgcaagaagaccgttgttcaaatccccgcccctaccaccgcgaaacagatgcgtgaatttcttggcacggcaggtttctgccgtttgtggattcctggctttgctacgttagcggcacccctctatccactcacgaaagagaaaggagaattctcttgggccccagaacatcagaaagcgtttgacgccatcaagaaagcgttattaagcgctcctgctcttgcattgcccgatgtcaccaaaccattcacgctctacgtggatgaacgcaaaggcgtagcccgcggtgtgttgacacagaccttaggaccttggcgtcgtcccgtggcctacctctcgaagaaacttgacccagttgcaagtggttggcctgtctgcttgaaagctattgccgcagttgcaatcctcgtcaaagatgccgacaaacttactttgggccagaacattactgttattgcaccacacgcccttgaaaacatcgttcgtcagccacctgatcgctggatgaccaatgctcgcatgacgcattatcagagcctcttgcttaccgaacgcgtgacttttgctccacctgcagccttaaaccccgcaacccttttacccgaagaaacagatgagcctgtgacgcatgactgtcaccagctcttgattgaagaaactggcgtacgcaaagacctcaccgatattccattaacaggtgaggtacttacgtggtttaccgaggggtcctcttatgtcgtcgaaggcaaacgtatggctggtgccgccgttgttgatggcacccgtactatctgggcaagcagcttacccgaaggcacgagtgctcagaaagcacaattgatggccttgacccaagccttacgccttgctgaagggaaatcgatcaatatttacaccgactcacgctatgcattcgccacggcacatgtacacggtgccatctacaaacaacgtggtttgttaacttctgctggccgcgagattaagaacaaagaagaaatcctttccttacttgaagccttacacctccccaaacgtctcgctattattcattgtccagggcatcagaaagcaaaagatcctatcagccgtgggaatcaaatggcagatcgtgtcgctaaacaggcagcccaaggcgttaacttgttgcccatgattgagacccctaaagctcca

SEQ ID NO: 242 - protein, 687 aa, synthetic construct
  REGION 1..687: note = Engineered reverse transcriptase variants
MHHHHHHGGSGVLTLQLDDEYRLYSPLVKPDQNIQFWLEQFPQAWAETGGMGLAKQVPPQVIQLKASATPVSVRQYPLSKEAQEGIRPHVQRLIQQGILVPVQSPWNTPLLPVRKPGTNDYRPVQDLREVNKRVQDIHPTVPNPYNLLCALPPQRSWYTVLDLKDAFFCLRLAPTSQPLFAFEWRDPDTGRTGQLTWTRLPQGFKNSPTIFDEALHRDLANFRIQHPQVTLLQYVDDLLLAGATKQDCLEGTKALLLELSDLGYRVSAKKAQICRREVTYLGYSLRDGQRWLTEARKKTVVQIPAPTTAKQMREFLGTAGFCRLWIPGFATLAAPLYPLTKEKGEFSWAPEHQKAFDAIKKALLSAPALALPDVTKPFTLYVDERKGVARGVLTQTLGPWRRPVAYLSKKLDPVASGWPVCLKAIAAVAILVKDADKLTLGQNITVIAPHALENIVRQPPDRWMTNARMTHYQSLLLTERVTFAPPAALNPATLLPEETDEPVTHDCHQLLIEETGVRKDLTDIPLTGEVLTWFTEGSSYVVEGKRMAGAAVVDGTRTIWASSLPEGTSAQKAQLMALTQALRLAEGKSINIYTDSRYAFATAHVHGAIYKQRGLLTSAGREIKNKEEILSLLEALHLPKRLAIIHCPGHQKAKDPISRGNQMADRVAKQAAQGVNLLPMIETPKAP

SEQ ID NO: 243 - DNA, 2061 bp, synthetic construct
  misc_feature 1..2061: note = Engineered reverse transcriptase variants
  source 1..2061: mol_type = other DNA
atgcatcaccatcaccatcatggtggtagcggagtgctgacccttcagctggatgatgaatatcgcttgtacagtccgctggtcaaaccagaccaaaacattcagttctggctcgaacagtttccgcaagcgtgggctgaaactggtggcatgggcctggccaaacaggttcctcctcaggtaatccaattaaaggcatctgccacgccggtgtcagttcgtcagtatccgctgtcgaaagaagcgcaagaggggattcgcccacacgtgcagcgtttgatccagcagggcattctggtaccggttcaaagcccctggaataccccgcttttaccagtccgcaaaccgggtacaaacgattaccgtcctgtgcaagacctgcgcgaagtcaataaacgtgtgcaggatatccacccaaccgttccgaacccgtataatctgttgtgcgcgttaccgccgcagcgttcctggtacacggtgctggacctgaaggacgcgttcttctgtcttcgtctccaccccaccagccagccactgtttgcctttgaatggcgcgatcctgatacgggccgtactgggcaattaacatggacccgtttgccgcagggctttaagaacagtcccaccatttttgatgaggctcttcaccgcgacctcgcaaatttccgcatccaacacccacaggtaacgttactccagtatgtcgatgatcttttgttagcggctgccaccaaacaggactgcttggaaggaacgaaagcacttctcttggaactctcggatttaggttatcgtgtgtccgccaagaaagctcagatttgtcgccgcgaagtgacatacttaggctattcattgcgtgatggtcaacgttggcttactgaggcgcgcaaggagaccattgttcaaatccccgcccctaccaccgcgcgtcagatgcgtgaatttcttggcacggcaggtttctgccgtttgtggattcctggctttgctaccttagcggcacccctctatccactcacgaaagagaaaggagaattctcttgggccccagaacatcagaaagcgtttgacgccatcaagaaagcgttattaagcgctcctgctcttgcattgcccgatgtgaccaaaccattcacgctctacgtggatgaacgcaaaggcgtagcccgcggtgtgttgacacagaccttaggaccttggcgtcgtcccgtggcctacctctcgaagaaacttgacccagttgcaagtggttggcctgtctgcttgaaagctattgccgcagttgcaatcctcgtcaaagatgccgacaaacttactttgggccagaacctgactgttattgcaccacacgcccttgaagcaatcgttcgtcagccacctgatcgctggatgaccaatgctcgcatgacgcattatcagagcctcttgcttaccgatcgcgtgacttttgctccacctgcagccttaaaccccgcaacccttttacccgaagaaacagatgagcctgtgacgcatgactgtcaccagctcttgattgaagaaactggcgtacgcaaagacctcaccgatattccattaacaggtgaggtacttacgtggtttaccgatgggtcctcttatgtcgtcgaaggcaaacgtatggctggtgccgccgttgttgatggcacccgtactatctgggcaagcagcttacccgaaggcacgagtgctcagaaagcagagttgatggccttgacccaagccttacgccttgctgaagggaaatcgatcaatatttacaccgactcacgctatgcattcgccacggcacatgtacacggtgccatctacaaacaacgtggtttgttaacttctgctggccgcgagattaagaacaaagaagaaatcctttccttacttgaagccttacacctccccaaacgtctcgctattattcattgtccagggcatcagaaagcaaaagatcctatcagccgtgggaatcagatggcagatcgtgtcgctaaacaggcagcccaaggcgttaacttgttgcccatgattgagacccctaaagctcca

SEQ ID NO: 244 - protein, 687 aa, synthetic construct
  REGION 1..687: note = Engineered reverse transcriptase variants
MHHHHHHGGSGVLTLQLDDEYRLYSPLVKPDQNIQFWLEQFPQAWAETGGMGLAKQVPPQVIQLKASATPVSVRQYPLSKEAQEGIRPHVQRLIQQGILVPVQSPWNTPLLPVRKPGTNDYRPVQDLREVNKRVQDIHPTVPNPYNLLCALPPQRSWYTVLDLKDAFFCLRLHPTSQPLFAFEWRDPDTGRTGQLTWTRLPQGFKNSPTIFDEALHRDLANFRIQHPQVTLLQYVDDLLLAAATKQDCLEGTKALLLELSDLGYRVSAKKAQICRREVTYLGYSLRDGQRWLTEARKETIVQIPAPTTARQMREFLGTAGFCRLWIPGFATLAAPLYPLTKEKGEFSWAPEHQKAFDAIKKALLSAPALALPDVTKPFTLYVDERKGVARGVLTQTLGPWRRPVAYLSKKLDPVASGWPVCLKAIAAVAILVKDADKLTLGQNLTVIAPHALEAIVRQPPDRWMTNARMTHYQSLLLTDRVTFAPPAALNPATLLPEETDEPVTHDCHQLLIEETGVRKDLTDIPLTGEVLTWFTDGSSYVVEGKRMAGAAVVDGTRTIWASSLPEGTSAQKAELMALTQALRLAEGKSINIYTDSRYAFATAHVHGAIYKQRGLLTSAGREIKNKEEILSLLEALHLPKRLAIIHCPGHQKAKDPISRGNQMADRVAKQAAQGVNLLPMIETPKAP

SEQ ID NO: 245 - DNA, 2061 bp, synthetic construct
  misc_feature 1..2061: note = Engineered reverse transcriptase variants
  source 1..2061: mol_type = other DNA
atgcatcaccatcaccatcatggtggtagcggagtgctgacccttcagctggatgatgaatatcgcttgtacagtccgctggtcaaaccagaccaaaacattcagttctggctcgaacagtttccgcaagcgtgggctgaaactggtggcatgggcctggccaaacaggttcctcctcaggtaatccagttaaaggcatctgccacgccggtgtcagttcgtcagtatccgctgtcgaaagaagcgcaagaggggattcgcccacacgttcagcgtttgatccagcagggcattctggtaccggttcaaagcccctggaataccccgcttttaccagtccgcaaaccgggtacaaacgattaccgtcctgtgcaagacctgcgcgaagtcaataaacgtgtgcaggatatccacccaaccgttccgaacccgtataatctgttgtgcgcgttaccgccgcagcgttcctggtacacggtgctggacctgaaggacgcgttcttctgtcttcgcctccatcccaccagccagccactgtttgcctttgaatggcgcgatcctgatacgggccgtactgggcaattaacatggacccgtttgccgcagggctttaagaacagtcccaccatttttgatgaggctcttcaccgcgacctcgcaaatttccgcatccaacacccacaggtaacgttactccagtatgtcgatgatcttttgttagcgggtgccaccaaacaggactgcttggaaggaacgaaagcacttctcttggaactctcggatttaggttatcgtgtgtccgccaagaaagctcagatttgtcgccgcgaagtgacatacttaggctattcattgcgtgatggtcaacgttggcttactgaggcgcgcaagaagaccgttgttcaaatccccgcccctacgaccccgaaacagatgcgtgaatttcttggcacggcaggtgcgtgccgtttgtggattcctggctttgctaccttagcggcacccctctatccactcacgaaagagaaaggagaattctcttgggccccagaacatcagaaagcgtttgacgccatcaagaaagcgttattaagcgctcctgctcttgcattgcccgatgtcaccaaaccattcacgctctacgtggatgaacgcaaaggcgtagcccgcggtgtgttgacacagaccttaggaccttggcgtcgtcccgtggcctacctctcgaagaaacttgacccagttgcaagtggttggcctgtctgcttgaaagctattgccgcagttgcaatcctcgtcaaagatgccgacaaacttactttgggccagaacattactgttattgcaccacacgcccttgaaaacatcgttcgtcagccacctgatcgctggatgaccaatgctcgcatgacgcattatcagagcctcttgcttaccgaacgcgtgacttttgctccacctgcagccttaaaccccgcaacccttttacccgaagaaacagatgagcctgtgacgcatgactgtcaccagctcttgattgaagaaactggcgtacgcaaagacctcaccgatattccattaacaggtgaggtacttacgtggtttaccgaggggtcctcttatgtcgtcgaaggcaaacgtatggctggtgccgccgttgttgatggcacccgtactatctgggcaagcagcttacccgaaggcacgagtgctcagaaagcagagttgatggccttgacccaagccttacgccttgctgaagggaaatcgatcaatatttacaccgactcacgcagcgcattcgccacggcacatgtacacggtgccatctacaaacaacgtggtttgttaacttctgctggccgcgagattaagaacaaagaagaaatcctttccttacttgaagccttacacctccccaaacgtctcgctattattcattgtccagggcatcagaaagcaaaagatcctatcagccgtgggaatcaaatggcagatcgtgtcgctaaacaggcagcccaaggcgttaacttgttgcccatgattgagacccctaaagctcca

SEQ ID NO: 246 - protein, 687 aa, synthetic construct
  REGION 1..687: note = Engineered reverse transcriptase variants
MHHHHHHGGSGVLTLQLDDEYRLYSPLVKPDQNIQFWLEQFPQAWAETGGMGLAKQVPPQVIQLKASATPVSVRQYPLSKEAQEGIRPHVQRLIQQGILVPVQSPWNTPLLPVRKPGTNDYRPVQDLREVNKRVQDIHPTVPNPYNLLCALPPQRSWYTVLDLKDAFFCLRLHPTSQPLFAFEWRDPDTGRTGQLTWTRLPQGFKNSPTIFDEALHRDLANFRIQHPQVTLLQYVDDLLLAGATKQDCLEGTKALLLELSDLGYRVSAKKAQICRREVTYLGYSLRDGQRWLTEARKKTVVQIPAPTTPKQMREFLGTAGACRLWIPGFATLAAPLYPLTKEKGEFSWAPEHQKAFDAIKKALLSAPALALPDVTKPFTLYVDERKGVARGVLTQTLGPWRRPVAYLSKKLDPVASGWPVCLKAIAAVAILVKDADKLTLGQNITVIAPHALENIVRQPPDRWMTNARMTHYQSLLLTERVTFAPPAALNPATLLPEETDEPVTHDCHQLLIEETGVRKDLTDIPLTGEVLTWFTEGSSYVVEGKRMAGAAVVDGTRTIWASSLPEGTSAQKAELMALTQALRLAEGKSINIYTDSRSAFATAHVHGAIYKQRGLLTSAGREIKNKEEILSLLEALHLPKRLAIIHCPGHQKAKDPISRGNQMADRVAKQAAQGVNLLPMIETPKAP

SEQ ID NO: 247 - DNA, 2061 bp, synthetic construct
  misc_feature 1..2061: note = Engineered reverse transcriptase variants
  source 1..2061: mol_type = other DNA
atgcatcaccatcaccatcatggtggtagcggagtgctgacccttcagctggatgatgaatatcgcttgtacagtccgctggtcaaaccagaccaaaacattcagttctggctcgaacagtttccgcaagcgtgggctgaaactgcaggcatgggcctggccaaacaggttcctcctcaggtaatcccgttaaaggcatcttcgacgccggtgtcagttcgtcagtatccgctgtcgaaagaggcgcaagaggggattcgcccacacgtgcagcgtttgatccagcagggcattctggtaccggttcaaagcccctggaataccccgcttttaccagtccgcaaaccgggtacaaacgattaccgtcctgtgcaagacctgcgcgaagtcaataaacgtgtgcaggatatccacccaaccgttccgaacccgtataatctgttgtgcgcgttaccgccgcagcgttcctggtacacggtgctggacctgaaggacgcgttcttctgtcttcgcctccaccccaccagccagccactgtttgcctttgaatggcgcgatcctgatacgggccgtactgggcaattaacatggacccgtttgccgcagggctttaagaacagtcccaccatttttgatgaggctcttcaccgcgacctcgcaaatttccgcatccaacacccacaggtaacgttactccagtatgtcgatgatcttttgttagcgggtgccaccaaacaggactgcttggaaggaacgaaagcacttctcttggaactctcgaacttaggttatcgtgtgtccgccaagaaagctcagatttgtcgccgcgaagtgacatacttaggctattcattgcgtgatggtcaacgttggcttactgaggcgcgcaagaagaccgttgttcaaatccccgcccctaccaccgcgaaacagatgcgtgaatttcttggcacggcaggtttctgccgtttgtggattcctggctttgctaccttagcggcacccctctatccactcacgaaagagaaaggagaattctcttgggccccagaacatcagaaagcgtttgacgccatcaagaaagcgttattaagcgctcctgctcttgcattgcccgatgtcaccaaaccattcacgctctacgtggatgaacgcaaaggcgtagcccgcggtgtgttgacacagaccttaggaccttggcgtcgtcccgtggcctacctctcgaagaaacttgacccagttgcaagtggttggcctgtctgcttgaaagctattgccgcagttgcaatcctcgtcaaagatgccgacaaacttactttgggccagaacattactgttattgcaccacacgcccttgaaaacatcgttcgtcagccacctgatcgctggatgaccaatgctcgcatgacgcattatcagagcctcttgcttaccgaacgcgtgacttttgctccacctgcagccttaaaccccgcaacccttttacccgaagaaacagatgagcctgtgacgcatgactgtcaccagctcttgattgaagaaactggcgtacgcaaagacctcaccgatattccattaacaggtgaggtacttacgtggtttaccggcgggtcctcttatgtcgtcgaaggcaaacgtatggctggtgccgccgttgttgatggcacccgtactatctgggcaagcagcttacccgaaggcacgagtgctcagaaagcagaattgatggccttgacccaagccttacgccttgctgaagggaaatcgatcaatatttacaccgactcacgctatgcattcgccacggcacatgtacacggtgccatctacaaacaacgtggtttgttaacttctgctggccgcgagattaagaacaaagaagaaatcctttccttacttgaagccttacacctccccaaacgtctcgctattattcattgtccagggcatcagaaagcaaaagatcctatcagccgtgggaatcaaatggcagatcgtgtcgctaaacaggcagcccaaggcgttaacttgttgcccatgattgagacccctaaagctcca

SEQ ID NO: 248 - protein, 687 aa, synthetic construct
  REGION 1..687: note = Engineered reverse transcriptase variants
MHHHHHHGGSGVLTLQLDDEYRLYSPLVKPDQNIQFWLEQFPQAWAETAGMGLAKQVPPQVIPLKASSTPVSVRQYPLSKEAQEGIRPHVQRLIQQGILVPVQSPWNTPLLPVRKPGTNDYRPVQDLREVNKRVQDIHPTVPNPYNLLCALPPQRSWYTVLDLKDAFFCLRLHPTSQPLFAFEWRDPDTGRTGQLTWTRLPQGFKNSPTIFDEALHRDLANFRIQHPQVTLLQYVDDLLLAGATKQDCLEGTKALLLELSNLGYRVSAKKAQICRREVTYLGYSLRDGQRWLTEARKKTVVQIPAPTTAKQMREFLGTAGFCRLWIPGFATLAAPLYPLTKEKGEFSWAPEHQKAFDAIKKALLSAPALALPDVTKPFTLYVDERKGVARGVLTQTLGPWRRPVAYLSKKLDPVASGWPVCLKAIAAVAILVKDADKLTLGQNITVIAPHALENIVRQPPDRWMTNARMTHYQSLLLTERVTFAPPAALNPATLLPEETDEPVTHDCHQLLIEETGVRKDLTDIPLTGEVLTWFTGGSSYVVEGKRMAGAAVVDGTRTIWASSLPEGTSAQKAELMALTQALRLAEGKSINIYTDSRYAFATAHVHGAIYKQRGLLTSAGREIKNKEEILSLLEALHLPKRLAIIHCPGHQKAKDPISRGNQMADRVAKQAAQGVNLLPMIETPKAP

SEQ ID NO: 249 - DNA, 2061 bp, synthetic construct
  misc_feature 1..2061: note = Engineered reverse transcriptase variants
  source 1..2061: mol_type = other DNA
atgcatcaccatcaccatcatggtggtagcggagtgctgacccttcagctggatgatgaatatcgcttgtacagtccgctggtcaaaccagaccaaaacattcagttctggctcgaacagtttccgcaagcgtgggctgaaactgcaggcatgggcctggccaaacaggttcctcctcaggtaatccaattaaaggcatctgccacgccggtgtcagttcgtcagtatccgctgtcgaaagaagcgcaagaggggattcgcccacacgtgcagcgtttgatccagcagggcattctggtaccggttcaaagcccctggaataccccgcttttaccagtccgcaaaccgggtacaaacgattaccgtcctgtgcaagacctgcgcgaagtcaataaacgtgtgcaggatatccacccaaccgttccgaacccgtataatctgttgtgcgcgttaccgccgcagcgttcctggtacacggtgctggacctgaaggacgcgttcttctgtcttcgcctccaccccaccagccagccactgtttgcctttgaatggcgcgatcctgatacgggccgtactgggcaattaacatggacccgtttgccgcagggctttaagaacagtcccaccatttttgatgaggctcttcaccgcgacctcgcaaatttccgcatccaacacccacaggtaacgttactccagtatgtcgatgatcttttgttagcgggtgccaccaaacaggactgcttggaaggaacgaaagcacttctcttggaactctcggatttaggttatcgtgtgtccgccaagaaagctcagatttgtcgccgcgaagtgacatacttaggctattcattgcgtgatggtcaacgttggcttactgaggcgcgcaagaagaccattgttcaaatccccgcccctaccaccgcgaagcagatgcgtgaatttcttggcacggcaggtttctgccgtttgtggattcctggctttgctaccttagcggcacccctctatccactcacgaaagagaaaggagaattctcttgggccccagaacatcagaaagcgtttgacgccatcaagaaagcgttattaagcgctcctgctcttgcattgcccgatgtcaccaaaccattcacgctctacgtggatgaacgcaaaggcgtagcccgcggtgtgttgacacagaccttaggaccttggcgtcgtcccgtggcctacctctcgaagaaacttgacccagttgcaagtggttggcctgtctgcttgaaagctattgccgcagttgcaatcctcgtcaaagatgccgacaaacttactttgggccagaacctgactgttattgcaccacacgcccttgaaaacatcgttcgtcagccacctgatcgctggatgaccaatgctcgcatgacgcattatcagagcctcttgcttaccgaacgcgtgacttttgctccacctgcagccttaaaccccgcaacccttttacccgaagaaacagatgagcctgtgacgcatgactgtctgcagctcttgattgaagaaactggcgtacgcaaagacctcaccgatattccattaacaggtgaggtacttacgtggtttaccgatgggtcctcttatgtcgtcgaaggcaaacgtatggctggtgccgccgttgttgatggcacccgtactatctgggcaagcagcttacccgaaggcacgagtgctcagaaagcagagttgatggccttgacccaagccttacgccttgctgaagggaaatcgatcaatatttacaccgactcacgctatgcattcgccacggcacatgtacacggtgccatctacaaacaacgtggtttgttaacttctgctggccgcgagattaagaacaaagaagaaatcctttccttacttgaagccttacacctccccaaacgtctcgctattattcattgtccagggcatcagaaagcaaaagatcctatcagccgtgggaatcagatggcagatcgtgtcgctaaacaggcagcccaaggcgttaacttgttgcccatgattgagacccctaaagctcca

SEQ ID NO: 250 - protein, 687 aa, synthetic construct
  REGION 1..687: note = Engineered reverse transcriptase variants
MHHHHHHGGSGVLTLQLDDEYRLYSPLVKPDQNIQFWLEQFPQAWAETAGMGLAKQVPPQVIQLKASATPVSVRQYPLSKEAQEGIRPHVQRLIQQGILVPVQSPWNTPLLPVRKPGTNDYRPVQDLREVNKRVQDIHPTVPNPYNLLCALPPQRSWYTVLDLKDAFFCLRLHPTSQPLFAFEWRDPDTGRTGQLTWTRLPQGFKNSPTIFDEALHRDLANFRIQHPQVTLLQYVDDLLLAGATKQDCLEGTKALLLELSDLGYRVSAKKAQICRREVTYLGYSLRDGQRWLTEARKKTIVQIPAPTTAKQMREFLGTAGFCRLWIPGFATLAAPLYPLTKEKGEFSWAPEHQKAFDAIKKALLSAPALALPDVTKPFTLYVDERKGVARGVLTQTLGPWRRPVAYLSKKLDPVASGWPVCLKAIAAVAILVKDADKLTLGQNLTVIAPHALENIVRQPPDRWMTNARMTHYQSLLLTERVTFAPPAALNPATLLPEETDEPVTHDCLQLLIEETGVRKDLTDIPLTGEVLTWFTDGSSYVVEGKRMAGAAVVDGTRTIWASSLPEGTSAQKAELMALTQALRLAEGKSINIYTDSRYAFATAHVHGAIYKQRGLLTSAGREIKNKEEILSLLEALHLPKRLAIIHCPGHQKAKDPISRGNQMADRVAKQAAQGVNLLPMIETPKAP

SEQ ID NO: 251 - DNA, 2061 bp, synthetic construct
  misc_feature 1..2061: note = Engineered reverse transcriptase variants
  source 1..2061: mol_type = other DNA
atgcatcaccatcaccatcatggtggtagcggagtgctgacccttcagctggatgatgaatatcgcttgtacagtccgctggtcaaaccagaccaaaacattcagttctggctcgaacagtttccgcaagcgtgggctgaaactgcaggcatgggcctggccaaacaggttcctcctcaggtaatccaattaaaggcatctgccacgccggtgtcagttcgtcagtatccgctgtcgaaagaggcgcaagaggggattcgcccacacgtgcagcgtttgatccagcagggcattctggtaccggttcaaagcccctggaataccccgcttttaccagtccgcaaaccgggtacaaacgattaccgtcctgtgcaagacctgcgcgaagtcaataaacgtgtgcaggatatccacccaaccgttccgaacccgtataatctgttgtgcgcgttaccgccgcagcgttcctggtacacggtgctggacctgaaggacgcgttcttctgtcttcgcctccaccccaccagccagccactgtttgcctttgaatggcgcgatcctgatacgggccgtactgggcaattaacatggacccgtttgccgcagggctttaagaacagtcccaccatttttgatgaggctcttcaccgcgacctcgcaaatttccgcatccaacacccacaggtaacgttactccagtatgtcgatgatcttttgttagcgggtgccaccaaacaggactgcttggaaggaacgaaagcacttctcttggaactctcggacttaggttatcgtgtgtccgccaagaaagctcagatttgtcgccgcgaagtgacatacttaggctattcattgcgtgatggtcaacgttggcttactgaggcgcgcaagcgcaccgttgttcaaatccccgcccctaccaccgcgaaacagatgcgtgaatttcttggcacggcaggtttctgccgtttgtggattcctggctttgctaccttagcggcacccctctatccactcacgaaagagaaaggagaattctcttgggccccagaacatcagaaagcgtttgacgccatcaagaaagcgttattaagcgctcctgctcttgcattgcccgatgtcaccaaaccattcacgctctacgtggatgaacgcaaaggcgtagcccgcggtgtgttgacacagaccttaggaccttggcgtcgtcccgtggcctacctctcgaagaaacttgacccagttgcaagtggttggcctgtctgcttgaaagctattgccgcagttgcaatcctcgtcaaagatgccgacaaacttactttgggccagaacattactgttattgcaccacacgcccttgaaaacatcgttcgtcagccacctgatcgctggatgaccaatgctcgcatgacgcattatcagagcctcttgcttaccgaacgcgtgacttttgctccacctgcagccttaaaccccgcaacccttttacccgaagaaacagatgagcctgtgacgcatgactgtcaccagctcttgattgaagaaactggcgtacgcaaagacctcaccgatattccattaacaggtgaggtacttacgtggtttaccgatgggtcctcttatgtcgtcgaaggcaaacgtatggctggtgccgccgttgttgatggcacccgtactatctgggcaagcagcttacccgaaggcacgagtgctcagaaagcagagttgatggccttgacccaagccttacgccttgctgaagggaaatcgatcaatatttacaccgactcacgctatgcattcgccacggcacatgtacacggtgccatctacaaacaacgtggtttgttaacttctgctggccgcgagattaagaacaaagaagaaatcctttccttacttgaagccttacacctccccaaacgtctcgctattattcattgtccagggcatcagaaagcaaaagatcctatcagccgtgggaatcaaatggcagatcgtgtcgctaaacaggcagcccaaggcgttaacttgttgcccatgattgagacccctaaagctcca

SEQ ID NO: 252 - protein, 687 aa, synthetic construct
  REGION 1..687: note = Engineered reverse transcriptase variants
MHHHHHHGGSGVLTLQLDDEYRLYSPLVKPDQNIQFWLEQFPQAWAETAGMGLAKQVPPQVIQLKASATPVSVRQYPLSKEAQEGIRPHVQRLIQQGILVPVQSPWNTPLLPVRKPGTNDYRPVQDLREVNKRVQDIHPTVPNPYNLLCALPPQRSWYTVLDLKDAFFCLRLHPTSQPLFAFEWRDPDTGRTGQLTWTRLPQGFKNSPTIFDEALHRDLANFRIQHPQVTLLQYVDDLLLAGATKQDCLEGTKALLLELSDLGYRVSAKKAQICRREVTYLGYSLRDGQRWLTEARKRTVVQIPAPTTAKQMREFLGTAGFCRLWIPGFATLAAPLYPLTKEKGEFSWAPEHQKAFDAIKKALLSAPALALPDVTKPFTLYVDERKGVARGVLTQTLGPWRRPVAYLSKKLDPVASGWPVCLKAIAAVAILVKDADKLTLGQNITVIAPHALENIVRQPPDRWMTNARMTHYQSLLLTERVTFAPPAALNPATLLPEETDEPVTHDCHQLLIEETGVRKDLTDIPLTGEVLTWFTDGSSYVVEGKRMAGAAVVDGTRTIWASSLPEGTSAQKAELMALTQALRLAEGKSINIYTDSRYAFATAHVHGAIYKQRGLLTSAGREIKNKEEILSLLEALHLPKRLAIIHCPGHQKAKDPISRGNQMADRVAKQAAQGVNLLPMIETPKAP

SEQ ID NO: 253 - DNA, 2061 bp, synthetic construct
  misc_feature 1..2061: note = Engineered reverse transcriptase variants
  source 1..2061: mol_type = other DNA
atgcatcaccatcaccatcatggtggtagcggagtgctgacccttcagctggatgatgaatatcgcttgtacagtccgctggtcaaaccagaccaaaacattcagttctggctcgaacagtttccgcaagcgtgggctgaaactggtggcatgggcctggccaaacaggttcctcctcaggtaatccaattaaaggcatctgccacgccggtgtcagttcgtcagtatccgctgtcgaaagaagcgcaagaggggattcgcccacacgtgcagcgtttgatccagcagggcattctggtaccggttcaaagcccctggaataccccgcttttaccagtccgcaaaccgggtacaaacgattaccgtcctgtgcaagacctgcgcgaagtcaataaacgtccgcaggatatccacccaaccgttccgaacccgtataatctgttgtgcgcgttaccgccgcagcgttcctggtacacggtgctggacctgaaggacgcgttcttctgtcttcgcctccatcccaccagccagccactgtttgcctttgaatggcgcgatcctgatacgggccgtactgggcaattaacatggacccgtttgccgcagggctttaagaacagtcccacgatctttgatgaggctcttcaccgcgacctcgcaaatttccgcatccaacacccacaggtaacgttactccagtatgtcgatgatcttttgttagcgggtgccaccaaacaggactgcttggaaggaacgaaagcacttctcttggaactctcggatttaggttatcgtgtgtccgccaagaaagctcagatttgtcgccgcgaagtgacatacttaggctattcattgcgtgatggtcaacgttggcttactgaggcgcgcaagaagaccgttgttcaaatccccgcccctaagaccgcgaaacagatgcgtgaatttcttggcacggcaggtttctgccgtttgtggattcctggctttgctacgttagcggcacccctctatccactcacgaaagagaaaggagaattctcttgggccccagaacatcagaaagcgtttgacgccatcaagaaagcgttattaagcgctcctgctcttgcattgcccgatgtcaccaaaccattcacgctctacgtggatgaacgcaaaggcgtagcccgcggtgtgttgacacagaccttaggaccttggcgtcgtcccgtggcctacctctcgaagaaacttgacccagttgcaagtggttggcctgtctgcttgaaagctattgccgcagttgcaatcctcgtcaaagatgccgacaaacttactttgggccagaacattactgttattgcaccacacgcccttgaaaacatcgttcgtcagccacctgatcgctggatgaccaatgctcgcatgacgcattatcagagcctcttgcttaccgaacgcgtgacttttgctccacctgcagccttaaaccccgcaacccttttacccgaagaaacagatgagcctgtgacgcatgactgtcaccagctcttgattgaagaaactggcgtacgcaaagacctcaccgatattccattaacaggtgaggtacttacgtggtttaccgaggggtcctcttatgtcgtcgaaggcaaacgtatggctggtgccgccgttgttgatggcacccgtactatctgggcaagcagcttacccgaaggcacgagtgctcagaaagcagagttgatggccttgacccaagccttacgccttgctgaagggaaatcgatcaatatttacaccgactcacgctatgcattcgccacggcacatgtacacggtgccatctacaaacaacgtggtttgttaacttctgctggccgcgagattaagaacaaagaagaaatcctttccttacttgaagccttacacctccccaaacgtctcgctattattcattgtccagggcatcagaaagcaaaagatcctatcagccgtgggaatcaaatggcagatcgtgtcgctaaacaggcagcccaaggcgttaacttgttgcccatgattgagacccctaaagctcca

SEQ ID NO: 254 - protein, 687 aa, synthetic construct
  REGION 1..687: note = Engineered reverse transcriptase variants
MHHHHHHGGSGVLTLQLDDEYRLYSPLVKPDQNIQFWLEQFPQAWAETGGMGLAKQVPPQVIQLKASATPVSVRQYPLSKEAQEGIRPHVQRLIQQGILVPVQSPWNTPLLPVRKPGTNDYRPVQDLREVNKRPQDIHPTVPNPYNLLCALPPQRSWYTVLDLKDAFFCLRLHPTSQPLFAFEWRDPDTGRTGQLTWTRLPQGFKNSPTIFDEALHRDLANFRIQHPQVTLLQYVDDLLLAGATKQDCLEGTKALLLELSDLGYRVSAKKAQICRREVTYLGYSLRDGQRWLTEARKKTVVQIPAPKTAKQMREFLGTAGFCRLWIPGFATLAAPLYPLTKEKGEFSWAPEHQKAFDAIKKALLSAPALALPDVTKPFTLYVDERKGVARGVLTQTLGPWRRPVAYLSKKLDPVASGWPVCLKAIAAVAILVKDADKLTLGQNITVIAPHALENIVRQPPDRWMTNARMTHYQSLLLTERVTFAPPAALNPATLLPEETDEPVTHDCHQLLIEETGVRKDLTDIPLTGEVLTWFTEGSSYVVEGKRMAGAAVVDGTRTIWASSLPEGTSAQKAELMALTQALRLAEGKSINIYTDSRYAFATAHVHGAIYKQRGLLTSAGREIKNKEEILSLLEALHLPKRLAIIHCPGHQKAKDPISRGNQMADRVAKQAAQGVNLLPMIETPKAP

SEQ ID NO: 255 - DNA, 2061 bp, synthetic construct
  misc_feature 1..2061: note = Engineered reverse transcriptase variants
  source 1..2061: mol_type = other DNA
atgcatcaccatcaccatcatggtggtagcggagtgctgacccttcagctggatgatgaatatcgcttgtacagtccgctggtcaaaccagaccaaaacattcagttctggctcgaacagtttccgcaagcgtgggctgaaactggtggcatgggcctggccaaacaggttcctcctcaggtaatccaattaaaggcatctgccacgccggtgtcagttccgcagtatccgctgtcgaaagaagcgcaagaggggattcgcccacacgtgcagcgtttgatccagcagggcattctggtaccggttcaaagcccctggaataccccgcttttaccagtccgcaaaccgggtacaaacgattaccgtcctgtgcaagacctgcgcgaagtcaataaacgtgtgcaggatatccacccaaccgttccgaacccgtataatctgttgtgcgcgttaccgccgcagcgttcctggtacacggtgctggacctgaaggacgcgttcttctgtcttcgcctccatcccaccagccagccactgtttgcctttgaatggcgcgatcctgatacgggccgtactgggcaattaacatggacccgtttgccgcagggctttaagaacagtcccacgatctttgatgaggctcttcaccgcgacctcgcaaatttccgcatccaacacccacaggtaacgttactccagtatgtcgatgatcttttgttagcgggtgccaccaaacaggactgcttggaaggaacgaaagcacttctcttggaactctcggatttaggttatcgtgtgtccgccaagaaagctcagatttgtcgccgcgaagtgacatacttaggctattcattgcgtgatggtcaacgttggcttactgaggcgcgcaagaagaccgttgttcaaatccccgcccctaagaccgcgaaacagatgcgtgaatttcttggcacggcaggtttctgccgtttgtggattcctggctttgctacgttagcggcacccctctatccactcacgaaagagaaaggagaattctcttgggccccagaacatcagaaagcgtttgacgccatcaagaaagcgttattaagcgctcctgctcttgcattgcccgatgtcaccaaaccattcacgctctacgtggatgaacgcaaaggcgtagcccgcggtgtgttgacacagaccttaggaccttggcgtcgtcccgtggcctacctctcgaagaaacttgacccagttgcaagtggttggcctgtctgcttgaaagctattgccgcagttgcaatcctcgtcaaagatgccgacaaacttactttgggccagaacattactgttattgcaccacacgcccttgaaaacatcgttcgtcagccacctgatcgctggatgaccaatgctcgcatgacgcattatcagagcctcttgcttaccgaacgcgtgacttttgctccacctgcagccttaaaccccgcaacccttttacccgaagaaacagatgagcctgtgacgcatgactgtcaccagctcttgattgaagaaactggcgtacgcaaagacctcaccgatattccattaacaggtgaggtacttacgtggtttaccgaggggtcctcttatgtcgtcgaaggcaaacgtatggctggtgccgccgttgttgatggcacccgtactatctgggcaagcagcttacccgaaggcacgagtgctcagaaagcagagttgatggccttgacccaagccttacgccttgctgaagggaaatcgatcaatatttacaccgactcacgctatgcattcgccacggcacatgtacacggtgccatctacaaacaacgtggtttgttaacttctgctggccgcgagattaagaacaaagaagaaatcctttccttacttgaagccttacacctccccaaacgtctcgctattattcattgtccagggcatcagaaagcaaaagatcctatcagccgtgggaatcaaatggcagatcgtgtcgctaaacaggcagcccaaggcgttaacttgttgcccatgattgagacccctaaagctcca

SEQ ID NO: 256 - protein, 687 aa, synthetic construct
  REGION 1..687: note = Engineered reverse transcriptase variants
MHHHHHHGGSGVLTLQLDDEYRLYSPLVKPDQNIQFWLEQFPQAWAETGGMGLAKQVPPQVIQLKASATPVSVPQYPLSKEAQEGIRPHVQRLIQQGILVPVQSPWNTPLLPVRKPGTNDYRPVQDLREVNKRVQDIHPTVPNPYNLLCALPPQRSWYTVLDLKDAFFCLRLHPTSQPLFAFEWRDPDTGRTGQLTWTRLPQGFKNSPTIFDEALHRDLANFRIQHPQVTLLQYVDDLLLAGATKQDCLEGTKALLLELSDLGYRVSAKKAQICRREVTYLGYSLRDGQRWLTEARKKTVVQIPAPKTAKQMREFLGTAGFCRLWIPGFATLAAPLYPLTKEKGEFSWAPEHQKAFDAIKKALLSAPALALPDVTKPFTLYVDERKGVARGVLTQTLGPWRRPVAYLSKKLDPVASGWPVCLKAIAAVAILVKDADKLTLGQNITVIAPHALENIVRQPPDRWMTNARMTHYQSLLLTERVTFAPPAALNPATLLPEETDEPVTHDCHQLLIEETGVRKDLTDIPLTGEVLTWFTEGSSYVVEGKRMAGAAVVDGTRTIWASSLPEGTSAQKAELMALTQALRLAEGKSINIYTDSRYAFATAHVHGAIYKQRGLLTSAGREIKNKEEILSLLEALHLPKRLAIIHCPGHQKAKDPISRGNQMADRVAKQAAQGVNLLPMIETPKAP

SEQ ID NO: 257 - DNA, 2061 bp, synthetic construct
  misc_feature 1..2061: note = Engineered reverse transcriptase variants
  source 1..2061: mol_type = other DNA
atgcatcaccatcaccatcatggtggtagcggagtgctgacccttcagctggatgatgaatatcgcttgtacagtccgctggtcaaaccagaccaaaacattcagttctggctcgaacagtttccgcaagcgtgggctgaaactggtggcatgggcctggccaaacaggttcctcctcaggtaatccaattaaaggcatctgccacgccggtgtcagttcgtcagtatccgctgtcgaaagaagcggcggaggggattcgcccacacgtgcagcgtttgatccagcagggcattctggtaccggttcaaagcccctggaataccccgcttttaccagtccgcaaaccgggtacaaacgattaccgtcctgtgcaagacctgcgcgaagtcaataaacgtgtgcaggatatccacccaaccgttccgaacccgtataatctgttgtgcgcgttaccgccgcagcgttcctggtacacggtgctggacctgaaggacgcgttcttctgtcttcgcctccatcccaccagccagccactgtttgcctttgaatggcgcgatcctgatacgggccgtactgggcaattaacatggacccgtttgccgcagggctttaagaacagtcccacgatctttgatgaggctcttcaccgcgacctcgcaaatttccgcatccaacacccacaggtaacgttactccagtatgtcgatgatcttttgttagcgggtgccaccaaacaggactgcttggaaggaacgaaagcacttctcttggaactctcggatttaggttatcgtgtgtccgccaagaaagctcagatttgtcgccgcgaagtgacatacttaggctattcattgcgtgatggtcaacgttggcttactgaggcgcgcaagaagaccgttgttcaaatccccgcccctaagaccgcgaaacagatgcgtgaatttcttggcacggcaggtttctgccgtttgtggattcctggctttgctacgttagcggcacccctctatccactcacgaaagagaaaggagaattctcttgggccccagaacatcagaaagcgtttgacgccatcaagaaagcgttattaagcgctcctgctcttgcattgcccgatgtcaccaaaccattcacgctctacgtggatgaacgcaaaggcgtagcccgcggtgtgttgacacagaccttaggaccttggcgtcgtcccgtggcctacctctcgaagaaacttgacccagttgcaagtggttggcctgtctgcttgaaagctattgccgcagttgcaatcctcgtcaaagatgccgacaaacttactttgggccagaacattactgttattgcaccacacgcccttgaaaacatcgttcgtcagccacctgatcgctggatgaccaatgctcgcatgacgcattatcagagcctcttgcttaccgaacgcgtgacttttgctccacctgcagccttaaaccccgcaacccttttacccgaagaaacagatgagcctgtgacgcatgactgtcaccagctcttgattgaagaaactggcgtacgcaaagacctcaccgatattccattaacaggtgaggtacttacgtggtttaccgaggggtcctcttatgtcgtcgaaggcaaacgtatggctggtgccgccgttgttgatggcacccgtactatctgggcaagcagcttacccgaaggcacgagtgctcagaaagcagagttgatggccttgacccaagccttacgccttgctgaagggaaatcgatcaatatttacaccgactcacgctatgcattcgccacggcacatgtacacggtgccatctacaaacaacgtggtttgttaacttctgctggccgcgagattaagaacaaagaagaaatcctttccttacttgaagccttacacctccccaaacgtctcgctattattcattgtccagggcatcagaaagcaaaagatcctatcagccgtgggaatcaaatggcagatcgtgtcgctaaacaggcagcccaaggcgttaacttgttgcccatgattgagacccctaaagctcca

SEQ ID NO: 258 - protein, 687 aa, synthetic construct
  REGION 1..687: note = Engineered reverse transcriptase variants
MHHHHHHGGSGVLTLQLDDEYRLYSPLVKPDQNIQFWLEQFPQAWAETGGMGLAKQVPPQVIQLKASATPVSVRQYPLSKEAAEGIRPHVQRLIQQGILVPVQSPWNTPLLPVRKPGTNDYRPVQDLREVNKRVQDIHPTVPNPYNLLCALPPQRSWYTVLDLKDAFFCLRLHPTSQPLFAFEWRDPDTGRTGQLTWTRLPQGFKNSPTIFDEALHRDLANFRIQHPQVTLLQYVDDLLLAGATKQDCLEGTKALLLELSDLGYRVSAKKAQICRREVTYLGYSLRDGQRWLTEARKKTVVQIPAPKTAKQMREFLGTAGFCRLWIPGFATLAAPLYPLTKEKGEFSWAPEHQKAFDAIKKALLSAPALALPDVTKPFTLYVDERKGVARGVLTQTLGPWRRPVAYLSKKLDPVASGWPVCLKAIAAVAILVKDADKLTLGQNITVIAPHALENIVRQPPDRWMTNARMTHYQSLLLTERVTFAPPAALNPATLLPEETDEPVTHDCHQLLIEETGVRKDLTDIPLTGEVLTWFTEGSSYVVEGKRMAGAAVVDGTRTIWASSLPEGTSAQKAELMALTQALRLAEGKSINIYTDSRYAFATAHVHGAIYKQRGLLTSAGREIKNKEEILSLLEALHLPKRLAIIHCPGHQKAKDPISRGNQMADRVAKQAAQGVNLLPMIETPKAP

SEQ ID NO: 259 - DNA, 2061 bp, synthetic construct
  misc_feature 1..2061: note = Engineered reverse transcriptase variants
  source 1..2061: mol_type = other DNA
atgcatcaccatcaccatcatggtggtagcggagtgctgacccttcagctggatgatgaatatcgcttgtacagtccgctggtcaaaccagaccaaaacattcagttctggctcgaacagtttccgcaagcgtgggctgaaactggtggcatgggcctggccaaacaggttcctcctcaggtaatccaattaaaggcatctgccacgccggtgtcagttcgtcagtatccgctgtcgaaagaagcgcaagaggggattcgcccacacgtgcagcgtttgatccagcagggcattctggtaccggttcaaagcccctggaataccccgcttttaccagtccgcaaaccgggtacaaacgattaccgtcctgtgcaagacctgcgcgaagtcaataaacgtgtgcaggatatccacccaaccgttccgaacccgtataatctgttgtgcgcgttaccgccgcagcgttcctggtacacggtgctggacctgaaggacgcgttcttctgtcttcgcctccatcccaccagccagccactgtttgcctttgaatggcgcgatcctgatacgggccgtactgggcaattaacatggacccgtttgccgcagggctttaagaacagtcccacgatctttgatgaggctcttcaccgcgacctcgcaaatttccgcatccaacacccacaggtaacgttactccagtatgtcgatgatcttttgttagcgggtgccaccaaacaggactgcttggaaggaacgaaagcacttctcttggaactctcggatttaggttatcgtgtgtccgccaagaaagctcagatttgtcgccgcgaagtgacatacttaggctattcattgcgtgatggtcaacgttggcttactgaggcgcgcaagaagaccgttgttcaaatccccgcccctaagaccgcgaaacagatgcgtgaatttcttggcacgggtggtttctgccgtttgtggattcctggctttgctacgttagcggcacccctctatccactcacgaaagagaaaggagaattctcttgggccccagaacatcagaaagcgtttgacgccatcaagaaagcgttattaagcgctcctgctcttgcattgcccgatgtcaccaaaccattcacgctctacgtggatgaacgcaaaggcgtagcccgcggtgtgttgacacagaccttaggaccttggcgtcgtcccgtggcctacctctcgaagaaacttgacccagttgcaagtggttggcctgtctgcttgaaagctattgccgcagttgcaatcctcgtcaaagatgccgacaaacttactttgggccagaacattactgttattgcaccacacgcccttgaaaacatcgttcgtcagccacctgatcgctggatgaccaatgctcgcatgacgcattatcagagcctcttgcttaccgaacgcgtgacttttgctccacctgcagccttaaaccccgcaacccttttacccgaagaaacagatgagcctgtgacgcatgactgtcaccagctcttgattgaagaaactggcgtacgcaaagacctcaccgatattccattaacaggtgaggtacttacgtggtttaccgaggggtcctcttatgtcgtcgaaggcaaacgtatggctggtgccgccgttgttgatggcacccgtactatctgggcaagcagcttacccgaaggcacgagtgctcagaaagcagagttgatggccttgacccaagccttacgccttgctgaagggaaatcgatcaatatttacaccgactcacgctatgcattcgccacggcacatgtacacggtgccatctacaaacaacgtggtttgttaacttctgctggccgcgagattaagaacaaagaagaaatcctttccttacttgaagccttacacctccccaaacgtctcgctattattcattgtccagggcatcagaaagcaaaagatcctatcagccgtgggaatcaaatggcagatcgtgtcgctaaacaggcagcccaaggcgttaacttgttgcccatgattgagacccctaaagctcca

SEQ ID NO: 260 - protein, 687 aa, synthetic construct
  REGION 1..687: note = Engineered reverse transcriptase variants
MHHHHHHGGSGVLTLQLDDEYRLYSPLVKPDQNIQFWLEQFPQAWAETGGMGLAKQVPPQVIQLKASATPVSVRQYPLSKEAQEGIRPHVQRLIQQGILVPVQSPWNTPLLPVRKPGTNDYRPVQDLREVNKRVQDIHPTVPNPYNLLCALPPQRSWYTVLDLKDAFFCLRLHPTSQPLFAFEWRDPDTGRTGQLTWTRLPQGFKNSPTIFDEALHRDLANFRIQHPQVTLLQYVDDLLLAGATKQDCLEGTKALLLELSDLGYRVSAKKAQICRREVTYLGYSLRDGQRWLTEARKKTVVQIPAPKTAKQMREFLGTGGFCRLWIPGFATLAAPLYPLTKEKGEFSWAPEHQKAFDAIKKALLSAPALALPDVTKPFTLYVDERKGVARGVLTQTLGPWRRPVAYLSKKLDPVASGWPVCLKAIAAVAILVKDADKLTLGQNITVIAPHALENIVRQPPDRWMTNARMTHYQSLLLTERVTFAPPAALNPATLLPEETDEPVTHDCHQLLIEETGVRKDLTDIPLTGEVLTWFTEGSSYVVEGKRMAGAAVVDGTRTIWASSLPEGTSAQKAELMALTQALRLAEGKSINIYTDSRYAFATAHVHGAIYKQRGLLTSAGREIKNKEEILSLLEALHLPKRLAIIHCPGHQKAKDPISRGNQMADRVAKQAAQGVNLLPMIETPKAP

SEQ ID NO: 261 - DNA, 2061 bp, synthetic construct
  misc_feature 1..2061: note = Engineered reverse transcriptase variants
  source 1..2061: mol_type = other DNA
atgcatcaccatcaccatcatggtggtagcggagtgctgacccttcagctggatgatgaatatcgcttgtacagtccgctggtcaaaccagaccaaaacattcagttctggctcgaacagtttccgcaagcgtgggctgaaactggtggcatgggcctggccaaacaggttcctcctcaggtaatccaattaaaggcatctgccacgccggtgtcagttcgtcagtatccgctgtcgaaagaagcgcaagaggggattcgcccacacgtgcagacgttgatccagcagggcattctggtaccggttcaaagcccctggaataccccgcttttaccagtccgcaaaccgggtacaaacgattaccgtcctgtgcaagacctgcgcgaagtcaataaacgtgtgcaggatatccacccaaccgttccgaacccgtataatctgttgtgcgcgttaccgccgcagcgttcctggtacacggtgctggacctgaaggacgcgttcttctgtcttcgcctccatcccaccagccagccactgtttgcctttgaatggcgcgatcctgatacgggccgtactgggcaattaacatggacccgtttgccgcagggctttaagaacagtcccacgatctttgatgaggctcttcaccgcgacctcgcaaatttccgcatccaacacccacaggtaacgttactccagtatgtcgatgatcttttgttagcgggtgccaccaaacaggactgcttggaaggaacgaaagcacttctcttggaactctcggatttaggttatcgtgtgtccgccaagaaagctcagatttgtcgccgcgaagtgacatacttaggctattcattgcgtgatggtcaacgttggcttactgaggcgcgcaagaagaccgttgttcaaatccccgcccctaagaccgcgaaacagatgcgtgaatttcttggcacggcaggtttctgccgtttgtggattcctggctttgctacgttagcggcacccctctatccactcacgaaagagaaaggagaattctcttgggccccagaacatcagaaagcgtttgacgccatcaagaaagcgttattaagcgctcctgctcttgcattgcccgatgtcaccaaaccattcacgctctacgtggatgaacgcaaaggcgtagcccgcggtgtgttgacacagaccttaggaccttggcgtcgtcccgtggcctacctctcgaagaaacttgacccagttgcaagtggttggcctgtctgcttgaaagctattgccgcagttgcaatcctcgtcaaagatgccgacaaacttactttgggccagaacattactgttattgcaccacacgcccttgaaaacatcgttcgtcagccacctgatcgctggatgaccaatgctcgcatgacgcattatcagagcctcttgcttaccgaacgcgtgacttttgctccacctgcagccttaaaccccgcaacccttttacccgaagaaacagatgagcctgtgacgcatgactgtcaccagctcttgattgaagaaactggcgtacgcaaagacctcaccgatattccattaacaggtgaggtacttacgtggtttaccgaggggtcctcttatgtcgtcgaaggcaaacgtatggctggtgccgccgttgttgatggcacccgtactatctgggcaagcagcttacccgaaggcacgagtgctcagaaagcagagttgatggccttgacccaagccttacgccttgctgaagggaaatcgatcaatatttacaccgactcacgctatgcattcgccacggcacatgtacacggtgccatctacaaacaacgtggtttgttaacttctgctggccgcgagattaagaacaaagaagaaatcctttccttacttgaagccttacacctccccaaacgtctcgctattattcattgtccagggcatcagaaagcaaaagatcctatcagccgtgggaatcaaatggcagatcgtgtcgctaaacaggcagcccaaggcgttaacttgttgcccatgattgagacccctaaagctcca

SEQ ID NO: 262 - protein, 687 aa, synthetic construct
  REGION 1..687: note = Engineered reverse transcriptase variants
MHHHHHHGGSGVLTLQLDDEYRLYSPLVKPDQNIQFWLEQFPQAWAETGGMGLAKQVPPQVIQLKASATPVSVRQYPLSKEAQEGIRPHVQTLIQQGILVPVQSPWNTPLLPVRKPGTNDYRPVQDLREVNKRVQDIHPTVPNPYNLLCALPPQRSWYTVLDLKDAFFCLRLHPTSQPLFAFEWRDPDTGRTGQLTWTRLPQGFKNSPTIFDEALHRDLANFRIQHPQVTLLQYVDDLLLAGATKQDCLEGTKALLLELSDLGYRVSAKKAQICRREVTYLGYSLRDGQRWLTEARKKTVVQIPAPKTAKQMREFLGTAGFCRLWIPGFATLAAPLYPLTKEKGEFSWAPEHQKAFDAIKKALLSAPALALPDVTKPFTLYVDERKGVARGVLTQTLGPWRRPVAYLSKKLDPVASGWPVCLKAIAAVAILVKDADKLTLGQNITVIAPHALENIVRQPPDRWMTNARMTHYQSLLLTERVTFAPPAALNPATLLPEETDEPVTHDCHQLLIEETGVRKDLTDIPLTGEVLTWFTEGSSYVVEGKRMAGAAVVDGTRTIWASSLPEGTSAQKAELMALTQALRLAEGKSINIYTDSRYAFATAHVHGAIYKQRGLLTSAGREIKNKEEILSLLEALHLPKRLAIIHCPGHQKAKDPISRGNQMADRVAKQAAQGVNLLPMIETPKAP

SEQ ID NO: 263 - DNA, 2061 bp, synthetic construct
  misc_feature 1..2061: note = Engineered reverse transcriptase variants
  source 1..2061: mol_type = other DNA
atgcatcaccatcaccatcatggtggtagcggagtgctgacccttcagctggatgatgaatatcgcttgtacagtccgctggtcaaaccagaccaaaacattcagttctggctcgaacagtttccgcaagcgtgggctgaaactggtggcatgggcctggccaaacaggttcctcctcaggtaatccaattaaaggcatctgccacgccggtgtcagttcgtcagtatccgctgtcgaaagaagcgcaagaggggattcgcccacacgtgcagcgtttgatccagcagggcattctggtaccggttcaaagcccctggaataccccgcttttaccagtccgcaaaccgggtacaaacgattaccgtcctgtgcaagacctgcgcgaagtcaataaacgtgtgcaggatatccacccaaccgttccgaacccgtataatctgttgtgcgcgttaccgccgcagcgttcctggtacacggtgctggacctgaaggacgcgttcttctgtcttcgcctccatcccaccagccagccactgtttgcctttgaatggcgcgatcctgatacgggccgtactgggcaattaacatggacccgtttgccgcagggctttaagaacagtcccacgatctttgatgaggctcttcaccgcgacctcgcaaatttccgcatccaacacccacaggtaacgttactccagtatgtcgatgatcttttgttagcgggtgccaccaaacaggactgcttggaaggaacgaaagcacttctcttggaactctcggatttaggttatcgtgtgtccgccaagaaagctcagatttgtcgccgcgaagtgacatacttaggctattcattgcgtgatggtcaacgttggcttactgaggcgcgcaagaagaccgttgttcaaatccccgcccctaagaccgcgaaacagatgcgtgaatttcttggcacggcaggtttctgccgtttgtggattcctggcagtgctacgttagcggcacccctctatccactcacgaaagagaaaggagaattctcttgggccccagaacatcagaaagcgtttgacgccatcaagaaagcgttattaagcgctcctgctcttgcattgcccgatgtcaccaaaccattcacgctctacgtggatgaacgcaaaggcgtagcccgcggtgtgttgacacagaccttaggaccttggcgtcgtcccgtggcctacctctcgaagaaacttgacccagttgcaagtggttggcctgtctgcttgaaagctattgccgcagttgcaatcctcgtcaaagatgccgacaaacttactttgggccagaacattactgttattgcaccacacgcccttgaaaacatcgttcgtcagccacctgatcgctggatgaccaatgctcgcatgacgcattatcagagcctcttgcttaccgaacgcgtgacttttgctccacctgcagccttaaaccccgcaacccttttacccgaagaaacagatgagcctgtgacgcatgactgtcaccagctcttgattgaagaaactggcgtacgcaaagacctcaccgatattccattaacaggtgaggtacttacgtggtttaccgaggggtcctcttatgtcgtcgaaggcaaacgtatggctggtgccgccgttgttgatggcacccgtactatctgggcaagcagcttacccgaaggcacgagtgctcagaaagcagagttgatggccttgacccaagccttacgccttgctgaagggaaatcgatcaatatttacaccgactcacgctatgcattcgccacggcacatgtacacggtgccatctacaaacaacgtggtttgttaacttctgctggccgcgagattaagaacaaagaagaaatcctttccttacttgaagccttacacctccccaaacgtctcgctattattcattgtccagggcatcagaaagcaaaagatcctatcagccgtgggaatcaaatggcagatcgtgtcgctaaacaggcagcccaaggcgttaacttgttgcccatgattgagacccctaaagctcca

SEQ ID NO: 264 - protein, 687 aa, synthetic construct
  REGION 1..687: note = Engineered reverse transcriptase variants
MHHHHHHGGSGVLTLQLDDEYRLYSPLVKPDQNIQFWLEQFPQAWAETGGMGLAKQVPPQVIQLKASATPVSVRQYPLSKEAQEGIRPHVQRLIQQGILVPVQSPWNTPLLPVRKPGTNDYRPVQDLREVNKRVQDIHPTVPNPYNLLCALPPQRSWYTVLDLKDAFFCLRLHPTSQPLFAFEWRDPDTGRTGQLTWTRLPQGFKNSPTIFDEALHRDLANFRIQHPQVTLLQYVDDLLLAGATKQDCLEGTKALLLELSDLGYRVSAKKAQICRREVTYLGYSLRDGQRWLTEARKKTVVQIPAPKTAKQMREFLGTAGFCRLWIPGSATLAAPLYPLTKEKGEFSWAPEHQKAFDAIKKALLSAPALALPDVTKPFTLYVDERKGVARGVLTQTLGPWRRPVAYLSKKLDPVASGWPVCLKAIAAVAILVKDADKLTLGQNITVIAPHALENIVRQPPDRWMTNARMTHYQSLLLTERVTFAPPAALNPATLLPEETDEPVTHDCHQLLIEETGVRKDLTDIPLTGEVLTWFTEGSSYVVEGKRMAGAAVVDGTRTIWASSLPEGTSAQKAELMALTQALRLAEGKSINIYTDSRYAFATAHVHGAIYKQRGLLTSAGREIKNKEEILSLLEALHLPKRLAIIHCPGHQKAKDPISRGNQMADRVAKQAAQGVNLLPMIETPKAP

SEQ ID NO: 265 - DNA, 2061 bp, synthetic construct
  misc_feature 1..2061: note = Engineered reverse transcriptase variants
  source 1..2061: mol_type = other DNA
atgcatcaccatcaccatcatggtggtagcggagtgctgacccttcagctggatgatgaatatcgcttgtacagtccgctggtcaaaccagaccaaaacattcagttctggctcgaacagtttccgcaagcgtgggctgaaactggtggcatgggcctggccaaacaggttcctcctcaggtaatccaattaaaggcatctgccacgccggtgtcagttcgtcagtatccgctgtcgaaagaagcgcaagaggggattcgcccacacgtgcagcgtttgatccagcagggcattctggtaccggttcaaagcccctggaataccccgcttttaccagtccgcaaaccgggtacaaacgattaccgtcctgtgcaagacctgcgcgaagtcaataaacgtgtgcaggatatccacccaaccgttccgaacccgtataatctgttgtgcgcgttaccgccgcagcgttcctggtacacggtgctggacctgaaggacgcgttcttctgtcttcgcctccatcccaccagccagccactgtttgcctttgaatggcgcgatcctgatacgggccgtactgggcaattaacatggacccgtttgccgcagggctttaagaacagtcccacgatctttgatgaggctcttcaccgcgacctcgcaaatttccgcatccaacacccacaggtaacgttactccagtatgtcgatgatcttttgttagcgggtgccaccaaacaggactgcttggaaggaacgaaagcacttctcttggaactctcggatttaggttatcgtgtgtccgccaagaaagctcagatttgtcgccgcgaagtgacatacttaggctattcattgcgtgatggtcaacgttggcttactgaggcgcgcaagaagaccgttgttcaaatccccgcccctaagaccgcgaaacagatgcgtgaatttcttggcacggcaggtttctgccgtttgtggattcctggctttgctacgttagcggcacccctctatccactcacgaaagaggcgggagaattctcttgggccccagaacatcagaaagcgtttgacgccatcaagaaagcgttattaagcgctcctgctcttgcattgcccgatgtcaccaaaccattcacgctctacgtggatgaacgcaaaggcgtagcccgcggtgtgttgacacagaccttaggaccttggcgtcgtcccgtggcctacctctcgaagaaacttgacccagttgcaagtggttggcctgtctgcttgaaagctattgccgcagttgcaatcctcgtcaaagatgccgacaaacttactttgggccagaacattactgttattgcaccacacgcccttgaaaacatcgttcgtcagccacctgatcgctggatgaccaatgctcgcatgacgcattatcagagcctcttgcttaccgaacgcgtgacttttgctccacctgcagccttaaaccccgcaacccttttacccgaagaaacagatgagcctgtgacgcatgactgtcaccagctcttgattgaagaaactggcgtacgcaaagacctcaccgatattccattaacaggtgaggtacttacgtggtttaccgaggggtcctcttatgtcgtcgaaggcaaacgtatggctggtgccgccgttgttgatggcacccgtactatctgggcaagcagcttacccgaaggcacgagtgctcagaaagcagagttgatggccttgacccaagccttacgccttgctgaagggaaatcgatcaatatttacaccgactcacgctatgcattcgccacggcacatgtacacggtgccatctacaaacaacgtggtttgttaacttctgctggccgcgagattaagaacaaagaagaaatcctttccttacttgaagccttacacctccccaaacgtctcgctattattcattgtccagggcatcagaaagcaaaagatcctatcagccgtgggaatcaaatggcagatcgtgtcgctaaacaggcagcccaaggcgttaacttgttgcccatgattgagacccctaaagctcca

SEQ ID NO: 266 - protein, 687 aa, synthetic construct
  REGION 1..687: note = Engineered reverse transcriptase variants
MHHHHHHGGSGVLTLQLDDEYRLYSPLVKPDQNIQFWLEQFPQAWAETGGMGLAKQVPPQVIQLKASATPVSVRQYPLSKEAQEGIRPHVQRLIQQGILVPVQSPWNTPLLPVRKPGTNDYRPVQDLREVNKRVQDIHPTVPNPYNLLCALPPQRSWYTVLDLKDAFFCLRLHPTSQPLFAFEWRDPDTGRTGQLTWTRLPQGFKNSPTIFDEALHRDLANFRIQHPQVTLLQYVDDLLLAGATKQDCLEGTKALLLELSDLGYRVSAKKAQICRREVTYLGYSLRDGQRWLTEARKKTVVQIPAPKTAKQMREFLGTAGFCRLWIPGFATLAAPLYPLTKEAGEFSWAPEHQKAFDAIKKALLSAPALALPDVTKPFTLYVDERKGVARGVLTQTLGPWRRPVAYLSKKLDPVASGWPVCLKAIAAVAILVKDADKLTLGQNITVIAPHALENIVRQPPDRWMTNARMTHYQSLLLTERVTFAPPAALNPATLLPEETDEPVTHDCHQLLIEETGVRKDLTDIPLTGEVLTWFTEGSSYVVEGKRMAGAAVVDGTRTIWASSLPEGTSAQKAELMALTQALRLAEGKSINIYTDSRYAFATAHVHGAIYKQRGLLTSAGREIKNKEEILSLLEALHLPKRLAIIHCPGHQKAKDPISRGNQMADRVAKQAAQGVNLLPMIETPKAP

SEQ ID NO: 267 - DNA, 2061 bp, synthetic construct
  misc_feature 1..2061: note = Engineered reverse transcriptase variants
  source 1..2061: mol_type = other DNA
atgcatcaccatcaccatcatggtggtagcggagtgctgacccttcagctggatgatgaatatcgcttgtacagtccgctggtcaaaccagaccaaaacattcagttctggctcgaacagtttccgcaagcgtgggctgaaactggtggcatgggcctggccaaacaggttcctcctcaggtaatccaattaaaggcatctgccacgccggtgtcagttcgtcagtatccgctgtcgaaagaagcgcaagaggggattcgcccacacgtgcagcgtttgatccagcagggcattctggtaccggttcaaagcccctggaataccccgcttttaccagtccgcaaaccgggtacaaacgattaccgtcctgtgcaagacctgcgcgaagtcaataaacgtgtgcaggatatccacccaaccgttccgaacccgtataatctgttgtgcgcgttaccgccgcagcgttcctggtacacggtgctggacctgaaggacgcgttcttctgtcttcgcctccatcccaccagccagccactgtttgcctttgaatggcgcgatcctgatacgggccgtactgggcaattaacatggacccgtttgccgcagggctttaagaacagtcccacgatctttgatgaggctcttcaccgcgacctcgcaaatttccgcatccaacacccacaggtaacgttactccagtatgtcgatgatcttttgttagcgggtgccaccaaacaggactgcttggaaggaacgaaagcacttctcttggaactctcggatttaggttatcgtgtgtccgccaagaaagctcagatttgtcgccgcgaagtgacatacttaggctattcattgcgtgatggtcaacgttggcttactgaggcgcgcaagaagaccgttgttcaaatccccgcccctaagaccgcgaaacctatgcgtgaatttcttggcacggcaggtttctgccgtttgtggattcctggctttgctacgttagcggcacccctctatccactcacgaaagagaaaggagaattctcttgggccccagaacatcagaaagcgtttgacgccatcaagaaagcgttattaagcgctcctgctcttgcattgcccgatgtcaccaaaccattcacgctctacgtggatgaacgcaaaggcgtagcccgcggtgtgttgacacagaccttaggaccttggcgtcgtcccgtggcctacctctcgaagaaacttgacccagttgcaagtggttggcctgtctgcttgaaagctattgccgcagttgcaatcctcgtcaaagatgccgacaaacttactttgggccagaacattactgttattgcaccacacgcccttgaaaacatcgttcgtcagccacctgatcgctggatgaccaatgctcgcatgacgcattatcagagcctcttgcttaccgaacgcgtgacttttgctccacctgcagccttaaaccccgcaacccttttacccgaagaaacagatgagcctgtgacgcatgactgtcaccagctcttgattgaagaaactggcgtacgcaaagacctcaccgatattccattaacaggtgaggtacttacgtggtttaccgaggggtcctcttatgtcgtcgaaggcaaacgtatggctggtgccgccgttgttgatggcacccgtactatctgggcaagcagcttacccgaaggcacgagtgctcagaaagcagagttgatggccttgacccaagccttacgccttgctgaagggaaatcgatcaatatttacaccgactcacgctatgcattcgccacggcacatgtacacggtgccatctacaaacaacgtggtttgttaacttctgctggccgcgagattaagaacaaagaagaaatcctttccttacttgaagccttacacctccccaaacgtctcgctattattcattgtccagggcatcagaaagcaaaagatcctatcagccgtgggaatcaaatggcagatcgtgtcgctaaacaggcagcccaaggcgttaacttgttgcccatgattgagacccctaaagctcca

SEQ ID NO: 268 - protein, 687 aa, synthetic construct
  REGION 1..687: note = Engineered reverse transcriptase variants
MHHHHHHGGSGVLTLQLDDEYRLYSPLVKPDQNIQFWLEQFPQAWAETGGMGLAKQVPPQVIQLKASATPVSVRQYPLSKEAQEGIRPHVQRLIQQGILVPVQSPWNTPLLPVRKPGTNDYRPVQDLREVNKRVQDIHPTVPNPYNLLCALPPQRSWYTVLDLKDAFFCLRLHPTSQPLFAFEWRDPDTGRTGQLTWTRLPQGFKNSPTIFDEALHRDLANFRIQHPQVTLLQYVDDLLLAGATKQDCLEGTKALLLELSDLGYRVSAKKAQICRREVTYLGYSLRDGQRWLTEARKKTVVQIPAPKTAKPMREFLGTAGFCRLWIPGFATLAAPLYPLTKEKGEFSWAPEHQKAFDAIKKALLSAPALALPDVTKPFTLYVDERKGVARGVLTQTLGPWRRPVAYLSKKLDPVASGWPVCLKAIAAVAILVKDADKLTLGQNITVIAPHALENIVRQPPDRWMTNARMTHYQSLLLTERVTFAPPAALNPATLLPEETDEPVTHDCHQLLIEETGVRKDLTDIPLTGEVLTWFTEGSSYVVEGKRMAGAAVVDGTRTIWASSLPEGTSAQKAELMALTQALRLAEGKSINIYTDSRYAFATAHVHGAIYKQRGLLTSAGREIKNKEEILSLLEALHLPKRLAIIHCPGHQKAKDPISRGNQMADRVAKQAAQGVNLLPMIETPKAP

SEQ ID NO: 269 - DNA, 2061 bp, synthetic construct
  misc_feature 1..2061: note = Engineered reverse transcriptase variants
  source 1..2061: mol_type = other DNA
atgcatcaccatcaccatcatggtggtagcggagtgctgacccttcagctggatgatgaatatcgcttgtacagtccgctggtcaaaccagaccaaaacattcagttctggctcgaacagtttccgcaagcgtgggctgaaactggtggcatgggcctggccaaacaggttcctcctcaggtaatccaattaaaggcatctgccacgccggtgtcagttcgtcagtatccgctgtcgaaagaagcgcaagaggggattcgcccacacgtgcagcgtttgatccagcagggcattctggtaccggttcaaagcccctggaataccccgcttttaccagtccgcaaaccgggtacaaacgattaccgtcctgtgcaagacctgcgcgaagtcaataaacgtgtgcaggatatccacccaaccgttccgaacccgtataatctgttgtgcgcgttaccgccgcagcgttcctggtacacggtgctggacctgaaggacgcgttcttctgtcttcgcctccatcccaccagccagccactgtttgcctttgaatggcgcgatcctgatacgggccgtactgggcaattaacatggacccgtttgccgcagggctttaagaacagtcccacgatctttgatgaggctcttcaccgcgacctcgcaaatttccgcatccaacacccacaggtaacgttactccagtatgtcgatgatcttttgttagcgggtgccaccaaacaggactgcttggaaggaacgaaagcacttctcttggaactctcggatttaggttatcgtgtgtccgccaagaaagctcagatttgtcgccgcgaagtgacatacttaggctattcattgcgtgatggtcaacgttggcttactgaggcgcgcaagaagaccgttgttcaaatccccgcccctaagaccgcgaaacagatgcgtgaatttcttggcacggcaggtttctgccgtttgtggattcctggctttgctacgttagcggcacccctctatgtgctcacgaaagagaaaggagaattctcttgggccccagaacatcagaaagcgtttgacgccatcaagaaagcgttattaagcgctcctgctcttgcattgcccgatgtcaccaaaccattcacgctctacgtggatgaacgcaaaggcgtagcccgcggtgtgttgacacagaccttaggaccttggcgtcgtcccgtggcctacctctcgaagaaacttgacccagttgcaagtggttggcctgtctgcttgaaagctattgccgcagttgcaatcctcgtcaaagatgccgacaaacttactttgggccagaacattactgttattgcaccacacgcccttgaaaacatcgttcgtcagccacctgatcgctggatgaccaatgctcgcatgacgcattatcagagcctcttgcttaccgaacgcgtgacttttgctccacctgcagccttaaaccccgcaacccttttacccgaagaaacagatgagcctgtgacgcatgactgtcaccagctcttgattgaagaaactggcgtacgcaaagacctcaccgatattccattaacaggtgaggtacttacgtggtttaccgaggggtcctcttatgtcgtcgaaggcaaacgtatggctggtgccgccgttgttgatggcacccgtactatctgggcaagcagcttacccgaaggcacgagtgctcagaaagcagagttgatggccttgacccaagccttacgccttgctgaagggaaatcgatcaatatttacaccgactcacgctatgcattcgccacggcacatgtacacggtgccatctacaaacaacgtggtttgttaacttctgctggccgcgagattaagaacaaagaagaaatcctttccttacttgaagccttacacctccccaaacgtctcgctattattcattgtccagggcatcagaaagcaaaagatcctatcagccgtgggaatcaaatggcagatcgtgtcgctaaacaggcagcccaaggcgttaacttgttgcccatgattgagacccctaaagctcca

SEQ ID NO: 270 - protein, 687 aa, synthetic construct
  REGION 1..687: note = Engineered reverse transcriptase variants
MHHHHHHGGSGVLTLQLDDEYRLYSPLVKPDQNIQFWLEQFPQAWAETGGMGLAKQVPPQVIQLKASATPVSVRQYPLSKEAQEGIRPHVQRLIQQGILVPVQSPWNTPLLPVRKPGTNDYRPVQDLREVNKRVQDIHPTVPNPYNLLCALPPQRSWYTVLDLKDAFFCLRLHPTSQPLFAFEWRDPDTGRTGQLTWTRLPQGFKNSPTIFDEALHRDLANFRIQHPQVTLLQYVDDLLLAGATKQDCLEGTKALLLELSDLGYRVSAKKAQICRREVTYLGYSLRDGQRWLTEARKKTVVQIPAPKTAKQMREFLGTAGFCRLWIPGFATLAAPLYVLTKEKGEFSWAPEHQKAFDAIKKALLSAPALALPDVTKPFTLYVDERKGVARGVLTQTLGPWRRPVAYLSKKLDPVASGWPVCLKAIAAVAILVKDADKLTLGQNITVIAPHALENIVRQPPDRWMTNARMTHYQSLLLTERVTFAPPAALNPATLLPEETDEPVTHDCHQLLIEETGVRKDLTDIPLTGEVLTWFTEGSSYVVEGKRMAGAAVVDGTRTIWASSLPEGTSAQKAELMALTQALRLAEGKSINIYTDSRYAFATAHVHGAIYKQRGLLTSAGREIKNKEEILSLLEALHLPKRLAIIHCPGHQKAKDPISRGNQMADRVAKQAAQGVNLLPMIETPKAP

SEQ ID NO: 271 - DNA, 2061 bp, synthetic construct
  misc_feature 1..2061: note = Engineered reverse transcriptase variants
  source 1..2061: mol_type = other DNA
atgcatcaccatcaccatcatggtggtagcggagtgctgacccttcagctggatgatgaatatcgcttgtacagtccgctggtcaaaccagaccaaaacattcagttctggctcgaacagtttccgcaagcgtgggctgaaactggtggcatgggcctggccaaacaggttcctcctcaggtaatccaattaaaggcatctgccacgccggtgtcagttcgtcagtatccgctgtcgaaagaagcgcaagaggggattcgcccacacgtgcagcgtttgatccagcagggcattctggtaccggttcaaagcccctggaataccccgcttttaccagtccgcaaaccgggtacaaacgattaccgtcctgtgcaagacctgcgcgaagtcaataaacgtgtgcaggatatccacccaaccgttccgaacccgtataatctgttgtgcgcgttaccgccgcagcgttcctggtacacggtgctggacctgaaggacgcgttcttctgtcttcgcctccatcccaccagccagccactgtttgcctttgaatggcgcgatcctgatacgggccgtactgggcaattatgttggacccgtttgccgcagggctttaagaacagtcccacgatctttgatgaggctcttcaccgcgacctcgcaaatttccgcatccaacacccacaggtaacgttactccagtatgtcgatgatcttttgttagcgggtgccaccaaacaggactgcttggaaggaacgaaagcacttctcttggaactctcggatttaggttatcgtgtgtccgccaagaaagctcagatttgtcgccgcgaagtgacatacttaggctattcattgcgtgatggtcaacgttggcttactgaggcgcgcaagaagaccgttgttcaaatccccgcccctaagaccgcgaaacagatgcgtgaatttcttggcacggcaggtttctgccgtttgtggattcctggctttgctacgttagcggcacccctctatccactcacgaaagagaaaggagaattctcttgggccccagaacatcagaaagcgtttgacgccatcaagaaagcgttattaagcgctcctgctcttgcattgcccgatgtcaccaaaccattcacgctctacgtggatgaacgcaaaggcgtagcccgcggtgtgttgacacagaccttaggaccttggcgtcgtcccgtggcctacctctcgaagaaacttgacccagttgcaagtggttggcctgtctgcttgaaagctattgccgcagttgcaatcctcgtcaaagatgccgacaaacttactttgggccagaacattactgttattgcaccacacgcccttgaaaacatcgttcgtcagccacctgatcgctggatgaccaatgctcgcatgacgcattatcagagcctcttgcttaccgaacgcgtgacttttgctccacctgcagccttaaaccccgcaacccttttacccgaagaaacagatgagcctgtgacgcatgactgtcaccagctcttgattgaagaaactggcgtacgcaaagacctcaccgatattccattaacaggtgaggtacttacgtggtttaccgaggggtcctcttatgtcgtcgaaggcaaacgtatggctggtgccgccgttgttgatggcacccgtactatctgggcaagcagcttacccgaaggcacgagtgctcagaaagcagagttgatggccttgacccaagccttacgccttgctgaagggaaatcgatcaatatttacaccgactcacgctatgcattcgccacggcacatgtacacggtgccatctacaaacaacgtggtttgttaacttctgctggccgcgagattaagaacaaagaagaaatcctttccttacttgaagccttacacctccccaaacgtctcgctattattcattgtccagggcatcagaaagcaaaagatcctatcagccgtgggaatcaaatggcagatcgtgtcgctaaacaggcagcccaaggcgttaacttgttgcccatgattgagacccctaaagctcca

SEQ ID NO: 272 - protein, 687 aa, synthetic construct
  REGION 1..687: note = Engineered reverse transcriptase variants
MHHHHHHGGSGVLTLQLDDEYRLYSPLVKPDQNIQFWLEQFPQAWAETGGMGLAKQVPPQVIQLKASATPVSVRQYPLSKEAQEGIRPHVQRLIQQGILVPVQSPWNTPLLPVRKPGTNDYRPVQDLREVNKRVQDIHPTVPNPYNLLCALPPQRSWYTVLDLKDAFFCLRLHPTSQPLFAFEWRDPDTGRTGQLCWTRLPQGFKNSPTIFDEALHRDLANFRIQHPQVTLLQYVDDLLLAGATKQDCLEGTKALLLELSDLGYRVSAKKAQICRREVTYLGYSLRDGQRWLTEARKKTVVQIPAPKTAKQMREFLGTAGFCRLWIPGFATLAAPLYPLTKEKGEFSWAPEHQKAFDAIKKALLSAPALALPDVTKPFTLYVDERKGVARGVLTQTLGPWRRPVAYLSKKLDPVASGWPVCLKAIAAVAILVKDADKLTLGQNITVIAPHALENIVRQPPDRWMTNARMTHYQSLLLTERVTFAPPAALNPATLLPEETDEPVTHDCHQLLIEETGVRKDLTDIPLTGEVLTWFTEGSSYVVEGKRMAGAAVVDGTRTIWASSLPEGTSAQKAELMALTQALRLAEGKSINIYTDSRYAFATAHVHGAIYKQRGLLTSAGREIKNKEEILSLLEALHLPKRLAIIHCPGHQKAKDPISRGNQMADRVAKQAAQGVNLLPMIETPKAP

SEQ ID NO: 273 - DNA, 2061 bp, synthetic construct
  misc_feature 1..2061: note = Engineered reverse transcriptase variants
  source 1..2061: mol_type = other DNA
atgcatcaccatcaccatcatggtggtagcggagtgctgacccttcagctggatgatgaatatcgcttgtacagtccgctggtcaaaccagaccaaaacattcagttctggctcgaacagtttccgcaagcgtgggctgaaactggtggcatgggcctggccaaacaggttcctcctcaggtaatccaattaaaggcatctgcccgtccggtgtcagttcgtcagtatccgctgtcgaaagaagcgcaagaggggattcgcccacacgtgcagcgtttgatccagcagggcattctggtaccggttcaaagcccctggaataccccgcttttaccagtccgcaaaccgggtacaaacgattaccgtcctgtgcaagacctgcgcgaagtcaataaacgtgtgcaggatatccacccaaccgttccgaacccgtataatctgttgtgcgcgttaccgccgcagcgttcctggtacacggtgctggacctgaaggacgcgttcttctgtcttcgcctccatcccaccagccagccactgtttgcctttgaatggcgcgatcctgatacgggccgtactgggcaattaacatggacccgtttgccgcagggctttaagaacagtcccacgatctttgatgaggctcttcaccgcgacctcgcaaatttccgcatccaacacccacaggtaacgttactccagtatgtcgatgatcttttgttagcgggtgccaccaaacaggactgcttggaaggaacgaaagcacttctcttggaactctcggatttaggttatcgtgtgtccgccaagaaagctcagatttgtcgccgcgaagtgacatacttaggctattcattgcgtgatggtcaacgttggcttactgaggcgcgcaagaagaccgttgttcaaatccccgcccctaagaccgcgaaacagatgcgtgaatttcttggcacggcaggtttctgccgtttgtggattcctggctttgctacgttagcggcacccctctatccactcacgaaagagaaaggagaattctcttgggccccagaacatcagaaagcgtttgacgccatcaagaaagcgttattaagcgctcctgctcttgcattgcccgatgtcaccaaaccattcacgctctacgtggatgaacgcaaaggcgtagcccgcggtgtgttgacacagaccttaggaccttggcgtcgtcccgtggcctacctctcgaagaaacttgacccagttgcaagtggttggcctgtctgcttgaaagctattgccgcagttgcaatcctcgtcaaagatgccgacaaacttactttgggccagaacattactgttattgcaccacacgcccttgaaaacatcgttcgtcagccacctgatcgctggatgaccaatgctcgcatgacgcattatcagagcctcttgcttaccgaacgcgtgacttttgctccacctgcagccttaaaccccgcaacccttttacccgaagaaacagatgagcctgtgacgcatgactgtcaccagctcttgattgaagaaactggcgtacgcaaagacctcaccgatattccattaacaggtgaggtacttacgtggtttaccgaggggtcctcttatgtcgtcgaaggcaaacgtatggctggtgccgccgttgttgatggcacccgtactatctgggcaagcagcttacccgaaggcacgagtgctcagaaagcagagttgatggccttgacccaagccttacgccttgctgaagggaaatcgatcaatatttacaccgactcacgctatgcattcgccacggcacatgtacacggtgccatctacaaacaacgtggtttgttaacttctgctggccgcgagattaagaacaaagaagaaatcctttccttacttgaagccttacacctccccaaacgtctcgctattattcattgtccagggcatcagaaagcaaaagatcctatcagccgtgggaatcaaatggcagatcgtgtcgctaaacaggcagcccaaggcgttaacttgttgcccatgattgagacccctaaagctcca

SEQ ID NO: 274 - protein, 687 aa, synthetic construct
  REGION 1..687: note = Engineered reverse transcriptase variants
MHHHHHHGGSGVLTLQLDDEYRLYSPLVKPDQNIQFWLEQFPQAWAETGGMGLAKQVPPQVIQLKASARPVSVRQYPLSKEAQEGIRPHVQRLIQQGILVPVQSPWNTPLLPVRKPGTNDYRPVQDLREVNKRVQDIHPTVPNPYNLLCALPPQRSWYTVLDLKDAFFCLRLHPTSQPLFAFEWRDPDTGRTGQLTWTRLPQGFKNSPTIFDEALHRDLANFRIQHPQVTLLQYVDDLLLAGATKQDCLEGTKALLLELSDLGYRVSAKKAQICRREVTYLGYSLRDGQRWLTEARKKTVVQIPAPKTAKQMREFLGTAGFCRLWIPGFATLAAPLYPLTKEKGEFSWAPEHQKAFDAIKKALLSAPALALPDVTKPFTLYVDERKGVARGVLTQTLGPWRRPVAYLSKKLDPVASGWPVCLKAIAAVAILVKDADKLTLGQNITVIAPHALENIVRQPPDRWMTNARMTHYQSLLLTERVTFAPPAALNPATLLPEETDEPVTHDCHQLLIEETGVRKDLTDIPLTGEVLTWFTEGSSYVVEGKRMAGAAVVDGTRTIWASSLPEGTSAQKAELMALTQALRLAEGKSINIYTDSRYAFATAHVHGAIYKQRGLLTSAGREIKNKEEILSLLEALHLPKRLAIIHCPGHQKAKDPISRGNQMADRVAKQAAQGVNLLPMIETPKAP

SEQ ID NO: 275 - DNA, 2061 bp, synthetic construct
  misc_feature 1..2061: note = Engineered reverse transcriptase variants
  source 1..2061: mol_type = other DNA
atgcatcaccatcaccatcatggtggtagcggagtgctgacccttcagctggatgatgaatatcgcttgtacagtccgctggtcaaaccagaccaaaacattcagttctggctcgaacagtttccgcaagcgtgggctgaaactggtggcatgggcctggccaaacaggttcctcctcaggtaatccaattaaaggcatctgccacgccggtgatggttcgtcagtatccgctgtcgaaagaagcgcaagaggggattcgcccacacgtgcagcgtttgatccagcagggcattctggtaccggttcaaagcccctggaataccccgcttttaccagtccgcaaaccgggtacaaacgattaccgtcctgtgcaagacctgcgcgaagtcaataaacgtgtgcaggatatccacccaaccgttccgaacccgtataatctgttgtgcgcgttaccgccgcagcgttcctggtacacggtgctggacctgaaggacgcgttcttctgtcttcgcctccatcccaccagccagccactgtttgcctttgaatggcgcgatcctgatacgggccgtactgggcaattaacatggacccgtttgccgcagggctttaagaacagtcccacgatctttgatgaggctcttcaccgcgacctcgcaaatttccgcatccaacacccacaggtaacgttactccagtatgtcgatgatcttttgttagcgggtgccaccaaacaggactgcttggaaggaacgaaagcacttctcttggaactctcggatttaggttatcgtgtgtccgccaagaaagctcagatttgtcgccgcgaagtgacatacttaggctattcattgcgtgatggtcaacgttggcttactgaggcgcgcaagaagaccgttgttcaaatccccgcccctaagaccgcgaaacagatgcgtgaatttcttggcacggcaggtttctgccgtttgtggattcctggctttgctacgttagcggcacccctctatccactcacgaaagagaaaggagaattctcttgggccccagaacatcagaaagcgtttgacgccatcaagaaagcgttattaagcgctcctgctcttgcattgcccgatgtcaccaaaccattcacgctctacgtggatgaacgcaaaggcgtagcccgcggtgtgttgacacagaccttaggaccttggcgtcgtcccgtggcctacctctcgaagaaacttgacccagttgcaagtggttggcctgtctgcttgaaagctattgccgcagttgcaatcctcgtcaaagatgccgacaaacttactttgggccagaacattactgttattgcaccacacgcccttgaaaacatcgttcgtcagccacctgatcgctggatgaccaatgctcgcatgacgcattatcagagcctcttgcttaccgaacgcgtgacttttgctccacctgcagccttaaaccccgcaacccttttacccgaagaaacagatgagcctgtgacgcatgactgtcaccagctcttgattgaagaaactggcgtacgcaaagacctcaccgatattccattaacaggtgaggtacttacgtggtttaccgaggggtcctcttatgtcgtcgaaggcaaacgtatggctggtgccgccgttgttgatggcacccgtactatctgggcaagcagcttacccgaaggcacgagtgctcagaaagcagagttgatggccttgacccaagccttacgccttgctgaagggaaatcgatcaatatttacaccgactcacgctatgcattcgccacggcacatgtacacggtgccatctacaaacaacgtggtttgttaacttctgctggccgcgagattaagaacaaagaagaaatcctttccttacttgaagccttacacctccccaaacgtctcgctattattcattgtccagggcatcagaaagcaaaagatcctatcagccgtgggaatcaaatggcagatcgtgtcgctaaacaggcagcccaaggcgttaacttgttgcccatgattgagacccctaaagctcca

SEQ ID NO: 276 - protein, 687 aa, synthetic construct
  REGION 1..687: note = Engineered reverse transcriptase variants
MHHHHHHGGSGVLTLQLDDEYRLYSPLVKPDQNIQFWLEQFPQAWAETGGMGLAKQVPPQVIQLKASATPVMVRQYPLSKEAQEGIRPHVQRLIQQGILVPVQSPWNTPLLPVRKPGTNDYRPVQDLREVNKRVQDIHPTVPNPYNLLCALPPQRSWYTVLDLKDAFFCLRLHPTSQPLFAFEWRDPDTGRTGQLTWTRLPQGFKNSPTIFDEALHRDLANFRIQHPQVTLLQYVDDLLLAGATKQDCLEGTKALLLELSDLGYRVSAKKAQICRREVTYLGYSLRDGQRWLTEARKKTVVQIPAPKTAKQMREFLGTAGFCRLWIPGFATLAAPLYPLTKEKGEFSWAPEHQKAFDAIKKALLSAPALALPDVTKPFTLYVDERKGVARGVLTQTLGPWRRPVAYLSKKLDPVASGWPVCLKAIAAVAILVKDADKLTLGQNITVIAPHALENIVRQPPDRWMTNARMTHYQSLLLTERVTFAPPAALNPATLLPEETDEPVTHDCHQLLIEETGVRKDLTDIPLTGEVLTWFTEGSSYVVEGKRMAGAAVVDGTRTIWASSLPEGTSAQKAELMALTQALRLAEGKSINIYTDSRYAFATAHVHGAIYKQRGLLTSAGREIKNKEEILSLLEALHLPKRLAIIHCPGHQKAKDPISRGNQMADRVAKQAAQGVNLLPMIETPKAP

SEQ ID NO: 277 - DNA, 2061 bp, synthetic construct
  misc_feature 1..2061: note = Engineered reverse transcriptase variants
  source 1..2061: mol_type = other DNA
atgcatcaccatcaccatcatggtggtagcggagtgctgacccttcagctggatgatgaatatcgcttgtacagtccgctggtcaaaccagaccaaaacattcagttctggctcgaacagtttccgcaagcgtgggctgaaactggtggcatgggcctggccaaacaggttcctcctcaggtaatccaattaaaggcatctgccacgccggtgtcagttcgtcagtatccgctgtcgaaagaagcgcaagaggggattcgcccacacgtgcagcgtttgatccagcagggcattctggtaccggttcaaagcccctggaataccccgcttttaccagtccgcaaaccgggtacaaacgattaccgtcctgtgcaagacctgcgcgaagtcaataaacgtgtgcaggatatccacccaaccgttccgaacccgtataatctgttgtgcgcgttaccgccgcagcgttcctggtacacggtgctggacctgaaggacgcgttcttctgtcttcgcctccatcccaccagccagccactgtttgcctttgaatggcgcgatcctgatacgggccgtactgggcaattaacatggacccgtttgccgcagggctttaagaacagtcccacgatctttgatgaggctcttcaccgcgacctcgcaaatttccgcatccaacacccacaggtaacgttactccagtatgtcgatgatcttttgttagcgggtgccaccaaacaggactgcttggaaggaacgaaagcacttctcttggaactctcggatttaggttatcgtgtgtccgccaagaaagctcagatttgtcgccgcgaagtgacatacttaggctattcattgcgtgatggtcaacgttggcttactcaggcgcgcaagaagaccgttgttcaaatccccgcccctaagaccgcgaaacagatgcgtgaatttcttggcacggcaggtttctgccgtttgtggattcctggctttgctacgttagcggcacccctctatccactcacgaaagagaaaggagaattctcttgggccccagaacatcagaaagcgtttgacgccatcaagaaagcgttattaagcgctcctgctcttgcattgcccgatgtcaccaaaccattcacgctctacgtggatgaacgcaaaggcgtagcccgcggtgtgttgacacagaccttaggaccttggcgtcgtcccgtggcctacctctcgaagaaacttgacccagttgcaagtggttggcctgtctgcttgaaagctattgccgcagttgcaatcctcgtcaaagatgccgacaaacttactttgggccagaacattactgttattgcaccacacgcccttgaaaacatcgttcgtcagccacctgatcgctggatgaccaatgctcgcatgacgcattatcagagcctcttgcttaccgaacgcgtgacttttgctccacctgcagccttaaaccccgcaacccttttacccgaagaaacagatgagcctgtgacgcatgactgtcaccagctcttgattgaagaaactggcgtacgcaaagacctcaccgatattccattaacaggtgaggtacttacgtggtttaccgaggggtcctcttatgtcgtcgaaggcaaacgtatggctggtgccgccgttgttgatggcacccgtactatctgggcaagcagcttacccgaaggcacgagtgctcagaaagcagagttgatggccttgacccaagccttacgccttgctgaagggaaatcgatcaatatttacaccgactcacgctatgcattcgccacggcacatgtacacggtgccatctacaaacaacgtggtttgttaacttctgctggccgcgagattaagaacaaagaagaaatcctttccttacttgaagccttacacctccccaaacgtctcgctattattcattgtccagggcatcagaaagcaaaagatcctatcagccgtgggaatcaaatggcagatcgtgtcgctaaacaggcagcccaaggcgttaacttgttgcccatgattgagacccctaaagctcca

SEQ ID NO: 278 - protein, 687 aa, synthetic construct
  REGION 1..687: note = Engineered reverse transcriptase variants
MHHHHHHGGSGVLTLQLDDEYRLYSPLVKPDQNIQFWLEQFPQAWAETGGMGLAKQVPPQVIQLKASATPVSVRQYPLSKEAQEGIRPHVQRLIQQGILVPVQSPWNTPLLPVRKPGTNDYRPVQDLREVNKRVQDIHPTVPNPYNLLCALPPQRSWYTVLDLKDAFFCLRLHPTSQPLFAFEWRDPDTGRTGQLTWTRLPQGFKNSPTIFDEALHRDLANFRIQHPQVTLLQYVDDLLLAGATKQDCLEGTKALLLELSDLGYRVSAKKAQICRREVTYLGYSLRDGQRWLTQARKKTVVQIPAPKTAKQMREFLGTAGFCRLWIPGFATLAAPLYPLTKEKGEFSWAPEHQKAFDAIKKALLSAPALALPDVTKPFTLYVDERKGVARGVLTQTLGPWRRPVAYLSKKLDPVASGWPVCLKAIAAVAILVKDADKLTLGQNITVIAPHALENIVRQPPDRWMTNARMTHYQSLLLTERVTFAPPAALNPATLLPEETDEPVTHDCHQLLIEETGVRKDLTDIPLTGEVLTWFTEGSSYVVEGKRMAGAAVVDGTRTIWASSLPEGTSAQKAELMALTQALRLAEGKSINIYTDSRYAFATAHVHGAIYKQRGLLTSAGREIKNKEEILSLLEALHLPKRLAIIHCPGHQKAKDPISRGNQMADRVAKQAAQGVNLLPMIETPKAP

SEQ ID NO: 279 - DNA, 2061 bp, synthetic construct
  misc_feature 1..2061: note = Engineered reverse transcriptase variants
  source 1..2061: mol_type = other DNA
atgcatcaccatcaccatcatggtggtagcggagtgctgacccttcagctggatgatgaatatcgcttgtacagtccgctggtcaaaccagaccaaaacattcagttctggctcgaacagtttccgcaagcgtgggctgaaactggtggcatgggcctggccaaacaggttcctcctcaggtaatccaattaaaggcatctgccacgccggtgtcagttcgtcagtatccgctgtcgaaagaagcgtgggaggggattcgcccacacgtgcagcgtttgatccagcagggcattctggtaccggttcaaagcccctggaataccccgcttttaccagtccgcaaaccgggtacaaacgattaccgtcctgtgcaagacctgcgcgaagtcaataaacgtgtgcaggatatccacccaaccgttccgaacccgtataatctgttgtgcgcgttaccgccgcagcgttcctggtacacggtgctggacctgaaggacgcgttcttctgtcttcgcctccatcccaccagccagccactgtttgcctttgaatggcgcgatcctgatacgggccgtactgggcaattaacatggacccgtttgccgcagggctttaagaacagtcccacgatctttgatgaggctcttcaccgcgacctcgcaaatttccgcatccaacacccacaggtaacgttactccagtatgtcgatgatcttttgttagcgggtgccaccaaacaggactgcttggaaggaacgaaagcacttctcttggaactctcggatttaggttatcgtgtgtccgccaagaaagctcagatttgtcgccgcgaagtgacatacttaggctattcattgcgtgatggtcaacgttggcttactgaggcgcgcaagaagaccgttgttcaaatccccgcccctaagaccgcgaaacagatgcgtgaatttcttggcacggcaggtttctgccgtttgtggattcctggctttgctacgttagcggcacccctctatccactcacgaaagagaaaggagaattctcttgggccccagaacatcagaaagcgtttgacgccatcaagaaagcgttattaagcgctcctgctcttgcattgcccgatgtcaccaaaccattcacgctctacgtggatgaacgcaaaggcgtagcccgcggtgtgttgacacagaccttaggaccttggcgtcgtcccgtggcctacctctcgaagaaacttgacccagttgcaagtggttggcctgtctgcttgaaagctattgccgcagttgcaatcctcgtcaaagatgccgacaaacttactttgggccagaacattactgttattgcaccacacgcccttgaaaacatcgttcgtcagccacctgatcgctggatgaccaatgctcgcatgacgcattatcagagcctcttgcttaccgaacgcgtgacttttgctccacctgcagccttaaaccccgcaacccttttacccgaagaaacagatgagcctgtgacgcatgactgtcaccagctcttgattgaagaaactggcgtacgcaaagacctcaccgatattccattaacaggtgaggtacttacgtggtttaccgaggggtcctcttatgtcgtcgaaggcaaacgtatggctggtgccgccgttgttgatggcacccgtactatctgggcaagcagcttacccgaaggcacgagtgctcagaaagcagagttgatggccttgacccaagccttacgccttgctgaagggaaatcgatcaatatttacaccgactcacgctatgcattcgccacggcacatgtacacggtgccatctacaaacaacgtggtttgttaacttctgctggccgcgagattaagaacaaagaagaaatcctttccttacttgaagccttacacctccccaaacgtctcgctattattcattgtccagggcatcagaaagcaaaagatcctatcagccgtgggaatcaaatggcagatcgtgtcgctaaacaggcagcccaaggcgttaacttgttgcccatgattgagacccctaaagctcca

SEQ ID NO: 280 - protein, 687 aa, synthetic construct
  REGION 1..687: note = Engineered reverse transcriptase variants
MHHHHHHGGSGVLTLQLDDEYRLYSPLVKPDQNIQFWLEQFPQAWAETGGMGLAKQVPPQVIQLKASATPVSVRQYPLSKEAWEGIRPHVQRLIQQGILVPVQSPWNTPLLPVRKPGTNDYRPVQDLREVNKRVQDIHPTVPNPYNLLCALPPQRSWYTVLDLKDAFFCLRLHPTSQPLFAFEWRDPDTGRTGQLTWTRLPQGFKNSPTIFDEALHRDLANFRIQHPQVTLLQYVDDLLLAGATKQDCLEGTKALLLELSDLGYRVSAKKAQICRREVTYLGYSLRDGQRWLTEARKKTVVQIPAPKTAKQMREFLGTAGFCRLWIPGFATLAAPLYPLTKEKGEFSWAPEHQKAFDAIKKALLSAPALALPDVTKPFTLYVDERKGVARGVLTQTLGPWRRPVAYLSKKLDPVASGWPVCLKAIAAVAILVKDADKLTLGQNITVIAPHALENIVRQPPDRWMTNARMTHYQSLLLTERVTFAPPAALNPATLLPEETDEPVTHDCHQLLIEETGVRKDLTDIPLTGEVLTWFTEGSSYVVEGKRMAGAAVVDGTRTIWASSLPEGTSAQKAELMALTQALRLAEGKSINIYTDSRYAFATAHVHGAIYKQRGLLTSAGREIKNKEEILSLLEALHLPKRLAIIHCPGHQKAKDPISRGNQMADRVAKQAAQGVNLLPMIETPKAP

SEQ ID NO: 281 - DNA, 2061 bp, synthetic construct
  misc_feature 1..2061: note = Engineered reverse transcriptase variants
  source 1..2061: mol_type = other DNA
atgcatcaccatcaccatcatggtggtagcggagtgctgacccttcagctggatgatgaatatcgcttgtacagtccgctggtcaaaccagaccaaaacattcagttctggctcgaacagtttccgcaagcgtgggctgaaactggtggcatgggcctggccaaacaggttcctcctcaggtaatccaattaaaggcatctgccacgccggtgtcagttcgtcagtatccgctgtcgaaagaagcgcaagaggggattcgcccacacgtgcagcgtttgatccagcagggcattctggtaccggttcaaagcccctggaataccccgcttttaccagtccgcaaaccgggtacaaacgattaccgtcctgtgcaagacctgcgcgaagtcaataaacgttttcaggatatccacccaaccgttccgaacccgtataatctgttgtgcgcgttaccgccgcagcgttcctggtacacggtgctggacctgaaggacgcgttcttctgtcttcgcctccatcccaccagccagccactgtttgcctttgaatggcgcgatcctgatacgggccgtactgggcaattaacatggacccgtttgccgcagggctttaagaacagtcccacgatctttgatgaggctcttcaccgcgacctcgcaaatttccgcatccaacacccacaggtaacgttactccagtatgtcgatgatcttttgttagcgggtgccaccaaacaggactgcttggaaggaacgaaagcacttctcttggaactctcggatttaggttatcgtgtgtccgccaagaaagctcagatttgtcgccgcgaagtgacatacttaggctattcattgcgtgatggtcaacgttggcttactgaggcgcgcaagaagaccgttgttcaaatccccgcccctaagaccgcgaaacagatgcgtgaatttcttggcacggcaggtttctgccgtttgtggattcctggctttgctacgttagcggcacccctctatccactcacgaaagagaaaggagaattctcttgggccccagaacatcagaaagcgtttgacgccatcaagaaagcgttattaagcgctcctgctcttgcattgcccgatgtcaccaaaccattcacgctctacgtggatgaacgcaaaggcgtagcccgcggtgtgttgacacagaccttaggaccttggcgtcgtcccgtggcctacctctcgaagaaacttgacccagttgcaagtggttggcctgtctgcttgaaagctattgccgcagttgcaatcctcgtcaaagatgccgacaaacttactttgggccagaacattactgttattgcaccacacgcccttgaaaacatcgttcgtcagccacctgatcgctggatgaccaatgctcgcatgacgcattatcagagcctcttgcttaccgaacgcgtgacttttgctccacctgcagccttaaaccccgcaacccttttacccgaagaaacagatgagcctgtgacgcatgactgtcaccagctcttgattgaagaaactggcgtacgcaaagacctcaccgatattccattaacaggtgaggtacttacgtggtttaccgaggggtcctcttatgtcgtcgaaggcaaacgtatggctggtgccgccgttgttgatggcacccgtactatctgggcaagcagcttacccgaaggcacgagtgctcagaaagcagagttgatggccttgacccaagccttacgccttgctgaagggaaatcgatcaatatttacaccgactcacgctatgcattcgccacggcacatgtacacggtgccatctacaaacaacgtggtttgttaacttctgctggccgcgagattaagaacaaagaagaaatcctttccttacttgaagccttacacctccccaaacgtctcgctattattcattgtccagggcatcagaaagcaaaagatcctatcagccgtgggaatcaaatggcagatcgtgtcgctaaacaggcagcccaaggcgttaacttgttgcccatgattgagacccctaaagctcca

SEQ ID NO: 282 - protein, 687 aa, synthetic construct
  REGION 1..687: note = Engineered reverse transcriptase variants
MHHHHHHGGSGVLTLQLDDEYRLYSPLVKPDQNIQFWLEQFPQAWAETGGMGLAKQVPPQVIQLKASATPVSVRQYPLSKEAQEGIRPHVQRLIQQGILVPVQSPWNTPLLPVRKPGTNDYRPVQDLREVNKRFQDIHPTVPNPYNLLCALPPQRSWYTVLDLKDAFFCLRLHPTSQPLFAFEWRDPDTGRTGQLTWTRLPQGFKNSPTIFDEALHRDLANFRIQHPQVTLLQYVDDLLLAGATKQDCLEGTKALLLELSDLGYRVSAKKAQICRREVTYLGYSLRDGQRWLTEARKKTVVQIPAPKTAKQMREFLGTAGFCRLWIPGFATLAAPLYPLTKEKGEFSWAPEHQKAFDAIKKALLSAPALALPDVTKPFTLYVDERKGVARGVLTQTLGPWRRPVAYLSKKLDPVASGWPVCLKAIAAVAILVKDADKLTLGQNITVIAPHALENIVRQPPDRWMTNARMTHYQSLLLTERVTFAPPAALNPATLLPEETDEPVTHDCHQLLIEETGVRKDLTDIPLTGEVLTWFTEGSSYVVEGKRMAGAAVVDGTRTIWASSLPEGTSAQKAELMALTQALRLAEGKSINIYTDSRYAFATAHVHGAIYKQRGLLTSAGREIKNKEEILSLLEALHLPKRLAIIHCPGHQKAKDPISRGNQMADRVAKQAAQGVNLLPMIETPKAP

SEQ ID NO: 283 - DNA, 2061 bp, synthetic construct
  misc_feature 1..2061: note = Engineered reverse transcriptase variants
  source 1..2061: mol_type = other DNA
atgcatcaccatcaccatcatggtggtagcggagtgctgacccttcagctggatgatgaatatcgcttgtacagtccgctggtcaaaccagaccaaaacattcagttctggctcgaacagtttccgcaagcgtgggctgaaactggtggcatgggcctggccaaacaggttcctcctcaggtaatccaattaaaggcatctgccacgccggtgtcagttcgtcagtatccgctgtcgaaagaagcgcaagaggggattcgcccacacgtgcagcgtttgatccagcagggcattctggtaccggttcaaagcccctggaataccccgcttttaccagtccgcaaaccgggtacaaacgattaccgtcctgtgcaagacctgcgcgaatctaataaacgtgtgcaggatatccacccaaccgttccgaacccgtataatctgttgtgcgcgttaccgccgcagcgttcctggtacacggtgctggacctgaaggacgcgttcttctgtcttcgcctccatcccaccagccagccactgtttgcctttgaatggcgcgatcctgatacgggccgtactgggcaattaacatggacccgtttgccgcagggctttaagaacagtcccacgatctttgatgaggctcttcaccgcgacctcgcaaatttccgcatccaacacccacaggtaacgttactccagtatgtcgatgatcttttgttagcgggtgccaccaaacaggactgcttggaaggaacgaaagcacttctcttggaactctcggatttaggttatcgtgtgtccgccaagaaagctcagatttgtcgccgcgaagtgacatacttaggctattcattgcgtgatggtcaacgttggcttactgaggcgcgcaagaagaccgttgttcaaatccccgcccctaagaccgcgaaacagatgcgtgaatttcttggcacggcaggtttctgccgtttgtggattcctggctttgctacgttagcggcacccctctatccactcacgaaagagaaaggagaattctcttgggccccagaacatcagaaagcgtttgacgccatcaagaaagcgttattaagcgctcctgctcttgcattgcccgatgtcaccaaaccattcacgctctacgtggatgaacgcaaaggcgtagcccgcggtgtgttgacacagaccttaggaccttggcgtcgtcccgtggcctacctctcgaagaaacttgacccagttgcaagtggttggcctgtctgcttgaaagctattgccgcagttgcaatcctcgtcaaagatgccgacaaacttactttgggccagaacattactgttattgcaccacacgcccttgaaaacatcgttcgtcagccacctgatcgctggatgaccaatgctcgcatgacgcattatcagagcctcttgcttaccgaacgcgtgacttttgctccacctgcagccttaaaccccgcaacccttttacccgaagaaacagatgagcctgtgacgcatgactgtcaccagctcttgattgaagaaactggcgtacgcaaagacctcaccgatattccattaacaggtgaggtacttacgtggtttaccgaggggtcctcttatgtcgtcgaaggcaaacgtatggctggtgccgccgttgttgatggcacccgtactatctgggcaagcagcttacccgaaggcacgagtgctcagaaagcagagttgatggccttgacccaagccttacgccttgctgaagggaaatcgatcaatatttacaccgactcacgctatgcattcgccacggcacatgtacacggtgccatctacaaacaacgtggtttgttaacttctgctggccgcgagattaagaacaaagaagaaatcctttccttacttgaagccttacacctccccaaacgtctcgctattattcattgtccagggcatcagaaagcaaaagatcctatcagccgtgggaatcaaatggcagatcgtgtcgctaaacaggcagcccaaggcgttaacttgttgcccatgattgagacccctaaagctcca

SEQ ID NO: 284 - protein, 687 aa, synthetic construct
  REGION 1..687: note = Engineered reverse transcriptase variants
MHHHHHHGGSGVLTLQLDDEYRLYSPLVKPDQNIQFWLEQFPQAWAETGGMGLAKQVPPQVIQLKASATPVSVRQYPLSKEAQEGIRPHVQRLIQQGILVPVQSPWNTPLLPVRKPGTNDYRPVQDLRESNKRVQDIHPTVPNPYNLLCALPPQRSWYTVLDLKDAFFCLRLHPTSQPLFAFEWRDPDTGRTGQLTWTRLPQGFKNSPTIFDEALHRDLANFRIQHPQVTLLQYVDDLLLAGATKQDCLEGTKALLLELSDLGYRVSAKKAQICRREVTYLGYSLRDGQRWLTEARKKTVVQIPAPKTAKQMREFLGTAGFCRLWIPGFATLAAPLYPLTKEKGEFSWAPEHQKAFDAIKKALLSAPALALPDVTKPFTLYVDERKGVARGVLTQTLGPWRRPVAYLSKKLDPVASGWPVCLKAIAAVAILVKDADKLTLGQNITVIAPHALENIVRQPPDRWMTNARMTHYQSLLLTERVTFAPPAALNPATLLPEETDEPVTHDCHQLLIEETGVRKDLTDIPLTGEVLTWFTEGSSYVVEGKRMAGAAVVDGTRTIWASSLPEGTSAQKAELMALTQALRLAEGKSINIYTDSRYAFATAHVHGAIYKQRGLLTSAGREIKNKEEILSLLEALHLPKRLAIIHCPGHQKAKDPISRGNQMADRVAKQAAQGVNLLPMIETPKAP

SEQ ID NO: 285 - DNA, 2061 bp, synthetic construct
  misc_feature 1..2061: note = Engineered reverse transcriptase variants
  source 1..2061: mol_type = other DNA
atgcatcaccatcaccatcatggtggtagcggagtgctgacccttcagctggatgatgaatatcgcttgtacagtccgctggtcaaaccagaccaaaacattcagttctggctcgaacagtttccgcaagcgtgggctgaaactggtggcatgggcctggccaaacaggttcctcctcaggtaatccaattaaaggcatctgccacgccggtgtcagttcgtcagtatccgctgtcgaaagaagcgcaagaggggattcgcccacacgtgcagcgtttgatccagcagggcattctggtaccggttcaaagcccctggaataccccgcttttaccagtccgcaaaccgggtacaaacgattaccgtcctgtgcaagacctgcgcgaagtcaataaacgtgtgcaggatatccacccaaccgttccgaacccgtataatctgttgtgcgcgttaccgccgcagcgttcctggtacacggtgctggacctgaaggacgcgttcttctgtcttcgcctccatcccaccagccagccactgtttgcctttgaatggcgcgatcctgatacgggccgtactgggcaattaacatggacccgtttgccgcagggctttaagaacagtcccacgatctttgatgaggctcttcaccgcgacctcgcaaatttccgcatccaacacccacaggtaacgttactccagtatgtcgatgatcttttgttagcgggtgccaccaaacaggactgcttggaaggaacgaaagcacttctcttggaactctcggatttaggttatcgtgtgtccgccaagaaagctcagatttgtcgccgcgaagtgacatacttaggctattcattgcgtgatggtcaacgttggcttactgaggcgcgcaagaagaccgttgttcaaatcccccctcctaagaccgcgaaacagatgcgtgaatttcttggcacggcaggtttctgccgtttgtggattcctggctttgctacgttagcggcacccctctatccactcacgaaagagaaaggagaattctcttgggccccagaacatcagaaagcgtttgacgccatcaagaaagcgttattaagcgctcctgctcttgcattgcccgatgtcaccaaaccattcacgctctacgtggatgaacgcaaaggcgtagcccgcggtgtgttgacacagaccttaggaccttggcgtcgtcccgtggcctacctctcgaagaaacttgacccagttgcaagtggttggcctgtctgcttgaaagctattgccgcagttgcaatcctcgtcaaagatgccgacaaacttactttgggccagaacattactgttattgcaccacacgcccttgaaaacatcgttcgtcagccacctgatcgctggatgaccaatgctcgcatgacgcattatcagagcctcttgcttaccgaacgcgtgacttttgctccacctgcagccttaaaccccgcaacccttttacccgaagaaacagatgagcctgtgacgcatgactgtcaccagctcttgattgaagaaactggcgtacgcaaagacctcaccgatattccattaacaggtgaggtacttacgtggtttaccgaggggtcctcttatgtcgtcgaaggcaaacgtatggctggtgccgccgttgttgatggcacccgtactatctgggcaagcagcttacccgaaggcacgagtgctcagaaagcagagttgatggccttgacccaagccttacgccttgctgaagggaaatcgatcaatatttacaccgactcacgctatgcattcgccacggcacatgtacacggtgccatctacaaacaacgtggtttgttaacttctgctggccgcgagattaagaacaaagaagaaatcctttccttacttgaagccttacacctccccaaacgtctcgctattattcattgtccagggcatcagaaagcaaaagatcctatcagccgtgggaatcaaatggcagatcgtgtcgctaaacaggcagcccaaggcgttaacttgttgcccatgattgagacccctaaagctcca

SEQ ID NO: 286 - protein, 687 aa, synthetic construct
  REGION 1..687: note = Engineered reverse transcriptase variants
MHHHHHHGGSGVLTLQLDDEYRLYSPLVKPDQNIQFWLEQFPQAWAETGGMGLAKQVPPQVIQLKASATPVSVRQYPLSKEAQEGIRPHVQRLIQQGILVPVQSPWNTPLLPVRKPGTNDYRPVQDLREVNKRVQDIHPTVPNPYNLLCALPPQRSWYTVLDLKDAFFCLRLHPTSQPLFAFEWRDPDTGRTGQLTWTRLPQGFKNSPTIFDEALHRDLANFRIQHPQVTLLQYVDDLLLAGATKQDCLEGTKALLLELSDLGYRVSAKKAQICRREVTYLGYSLRDGQRWLTEARKKTVVQIPPPKTAKQMREFLGTAGFCRLWIPGFATLAAPLYPLTKEKGEFSWAPEHQKAFDAIKKALLSAPALALPDVTKPFTLYVDERKGVARGVLTQTLGPWRRPVAYLSKKLDPVASGWPVCLKAIAAVAILVKDADKLTLGQNITVIAPHALENIVRQPPDRWMTNARMTHYQSLLLTERVTFAPPAALNPATLLPEETDEPVTHDCHQLLIEETGVRKDLTDIPLTGEVLTWFTEGSSYVVEGKRMAGAAVVDGTRTIWASSLPEGTSAQKAELMALTQALRLAEGKSINIYTDSRYAFATAHVHGAIYKQRGLLTSAGREIKNKEEILSLLEALHLPKRLAIIHCPGHQKAKDPISRGNQMADRVAKQAAQGVNLLPMIETPKAP

SEQ ID NO: 287 - DNA, 2061 bp, synthetic construct
  misc_feature 1..2061: note = Engineered reverse transcriptase variants
  source 1..2061: mol_type = other DNA
atgcatcaccatcaccatcatggtggtagcggagtgctgacccttcagctggatgatgaatatcgcttgtacagtccgctggtcaaaccagaccaaaacattcagttctggctcgaacagtttccgcaagcgtgggctgaaactggtggcatgggcctggccaaacaggttcctcctcaggtaatccaattaaaggcatctgccacgccggtgtcagttcgtcagtatccgctgtcgaaagaagcgcaagaggggattcgcccacacgtgcagcgtttgatccagcagggcattctggtaccggttcaaagcccctggaataccccgcttttaccagtccgcaaaccgggtacaaacgattaccgtcctgtgcaagacctgcgcgaagtcaataaacgtgtgcaggatatccacccaaccgttccgaacccgtataatctgttgtgcgcgttaccgccgcagcgttcctggtacacggtgctggacctgaaggacgcgttcttctgtcttcgcctccatcccaccagccagccactgtttgcctttgaatggcgcgatcctgatacgggccgtactgggcaattaacatggacccgtttgccgcagggctttaagaacagtcccacgatctttgatgaggctcttcaccgcgacctcgcaaatttccgcatccaacacccacaggtaacgttactccagtatgtcgatgatcttttgttagcgggtgccaccaaacaggactgcttggaaggaacgaaagcacttctcttggaactctcggatttaggttatcgtgtgtccgccaagaaagctcagatttgtcgccgcgaagtgacatacttaggctattcattgcgtgatggtcaacgttggcttactgaggcgcgcaagaagaccgttgttcaaatccccgcccctaagaccgcgaaacagatgcgtgaatttcttggcacgagtggtttctgccgtttgtggattcctggctttgctacgttagcggcacccctctatccactcacgaaagagaaaggagaattctcttgggccccagaacatcagaaagcgtttgacgccatcaagaaagcgttattaagcgctcctgctcttgcattgcccgatgtcaccaaaccattcacgctctacgtggatgaacgcaaaggcgtagcccgcggtgtgttgacacagaccttaggaccttggcgtcgtcccgtggcctacctctcgaagaaacttgacccagttgcaagtggttggcctgtctgcttgaaagctattgccgcagttgcaatcctcgtcaaagatgccgacaaacttactttgggccagaacattactgttattgcaccacacgcccttgaaaacatcgttcgtcagccacctgatcgctggatgaccaatgctcgcatgacgcattatcagagcctcttgcttaccgaacgcgtgacttttgctccacctgcagccttaaaccccgcaacccttttacccgaagaaacagatgagcctgtgacgcatgactgtcaccagctcttgattgaagaaactggcgtacgcaaagacctcaccgatattccattaacaggtgaggtacttacgtggtttaccgaggggtcctcttatgtcgtcgaaggcaaacgtatggctggtgccgccgttgttgatggcacccgtactatctgggcaagcagcttacccgaaggcacgagtgctcagaaagcagagttgatggccttgacccaagccttacgccttgctgaagggaaatcgatcaatatttacaccgactcacgctatgcattcgccacggcacatgtacacggtgccatctacaaacaacgtggtttgttaacttctgctggccgcgagattaagaacaaagaagaaatcctttccttacttgaagccttacacctccccaaacgtctcgctattattcattgtccagggcatcagaaagcaaaagatcctatcagccgtgggaatcaaatggcagatcgtgtcgctaaacaggcagcccaaggcgttaacttgttgcccatgattgagacccctaaagctcca

SEQ ID NO: 288 - protein, 687 aa, synthetic construct
  REGION 1..687: note = Engineered reverse transcriptase variants
MHHHHHHGGSGVLTLQLDDEYRLYSPLVKPDQNIQFWLEQFPQAWAETGGMGLAKQVPPQVIQLKASATPVSVRQYPLSKEAQEGIRPHVQRLIQQGILVPVQSPWNTPLLPVRKPGTNDYRPVQDLREVNKRVQDIHPTVPNPYNLLCALPPQRSWYTVLDLKDAFFCLRLHPTSQPLFAFEWRDPDTGRTGQLTWTRLPQGFKNSPTIFDEALHRDLANFRIQHPQVTLLQYVDDLLLAGATKQDCLEGTKALLLELSDLGYRVSAKKAQICRREVTYLGYSLRDGQRWLTEARKKTVVQIPAPKTAKQMREFLGTSGFCRLWIPGFATLAAPLYPLTKEKGEFSWAPEHQKAFDAIKKALLSAPALALPDVTKPFTLYVDERKGVARGVLTQTLGPWRRPVAYLSKKLDPVASGWPVCLKAIAAVAILVKDADKLTLGQNITVIAPHALENIVRQPPDRWMTNARMTHYQSLLLTERVTFAPPAALNPATLLPEETDEPVTHDCHQLLIEETGVRKDLTDIPLTGEVLTWFTEGSSYVVEGKRMAGAAVVDGTRTIWASSLPEGTSAQKAELMALTQALRLAEGKSINIYTDSRYAFATAHVHGAIYKQRGLLTSAGREIKNKEEILSLLEALHLPKRLAIIHCPGHQKAKDPISRGNQMADRVAKQAAQGVNLLPMIETPKAP

SEQ ID NO: 289 - DNA, 2061 bp, synthetic construct
  misc_feature 1..2061: note = Engineered reverse transcriptase variants
  source 1..2061: mol_type = other DNA
atgcatcaccatcaccatcatggtggtagcggagtgctgacccttcagctggatgatgaatatcgcttgtacagtccgctggtcaaaccagaccaaaacattcagttctggctcgaacagtttccgcaagcgtgggctgaaactggtggcatgggcctggccaaacaggttcctcctcaggtaatccaattaaaggcatctgccacgccggtgtcagttcgtcagtatccgctgtcgaaagaagcgcaagaggggattcgcccacacgtgcagcgtttgatccagcagggcattctggtaccggttcaaagcccctggaataccccgcttttaccaacgcgcaaaccgggtacaaacgattaccgtcctgtgcaagacctgcgcgaagtcaataaacgtgtgcaggatatccacccaaccgttccgaacccgtataatctgttgtgcgcgttaccgccgcagcgttcctggtacacggtgctggacctgaaggacgcgttcttctgtcttcgcctccatcccaccagccagccactgtttgcctttgaatggcgcgatcctgatacgggccgtactgggcaattaacatggacccgtttgccgcagggctttaagaacagtcccacgatctttgatgaggctcttcaccgcgacctcgcaaatttccgcatccaacacccacaggtaacgttactccagtatgtcgatgatcttttgttagcgggtgccaccaaacaggactgcttggaaggaacgaaagcacttctcttggaactctcggatttaggttatcgtgtgtccgccaagaaagctcagatttgtcgccgcgaagtgacatacttaggctattcattgcgtgatggtcaacgttggcttactgaggcgcgcaagaagaccgttgttcaaatccccgcccctaagaccgcgaaacagatgcgtgaatttcttggcacggcaggtttctgccgtttgtggattcctggctttgctacgttagcggcacccctctatccactcacgaaagagaaaggagaattctcttgggccccagaacatcagaaagcgtttgacgccatcaagaaagcgttattaagcgctcctgctcttgcattgcccgatgtcaccaaaccattcacgctctacgtggatgaacgcaaaggcgtagcccgcggtgtgttgacacagaccttaggaccttggcgtcgtcccgtggcctacctctcgaagaaacttgacccagttgcaagtggttggcctgtctgcttgaaagctattgccgcagttgcaatcctcgtcaaagatgccgacaaacttactttgggccagaacattactgttattgcaccacacgcccttgaaaacatcgttcgtcagccacctgatcgctggatgaccaatgctcgcatgacgcattatcagagcctcttgcttaccgaacgcgtgacttttgctccacctgcagccttaaaccccgcaacccttttacccgaagaaacagatgagcctgtgacgcatgactgtcaccagctcttgattgaagaaactggcgtacgcaaagacctcaccgatattccattaacaggtgaggtacttacgtggtttaccgaggggtcctcttatgtcgtcgaaggcaaacgtatggctggtgccgccgttgttgatggcacccgtactatctgggcaagcagcttacccgaaggcacgagtgctcagaaagcagagttgatggccttgacccaagccttacgccttgctgaagggaaatcgatcaatatttacaccgactcacgctatgcattcgccacggcacatgtacacggtgccatctacaaacaacgtggtttgttaacttctgctggccgcgagattaagaacaaagaagaaatcctttccttacttgaagccttacacctccccaaacgtctcgctattattcattgtccagggcatcagaaagcaaaagatcctatcagccgtgggaatcaaatggcagatcgtgtcgctaaacaggcagcccaaggcgttaacttgttgcccatgattgagacccctaaagctcca

SEQ ID NO: 290 - protein, 687 aa, synthetic construct
  REGION 1..687: note = Engineered reverse transcriptase variants
MHHHHHHGGSGVLTLQLDDEYRLYSPLVKPDQNIQFWLEQFPQAWAETGGMGLAKQVPPQVIQLKASATPVSVRQYPLSKEAQEGIRPHVQRLIQQGILVPVQSPWNTPLLPTRKPGTNDYRPVQDLREVNKRVQDIHPTVPNPYNLLCALPPQRSWYTVLDLKDAFFCLRLHPTSQPLFAFEWRDPDTGRTGQLTWTRLPQGFKNSPTIFDEALHRDLANFRIQHPQVTLLQYVDDLLLAGATKQDCLEGTKALLLELSDLGYRVSAKKAQICRREVTYLGYSLRDGQRWLTEARKKTVVQIPAPKTAKQMREFLGTAGFCRLWIPGFATLAAPLYPLTKEKGEFSWAPEHQKAFDAIKKALLSAPALALPDVTKPFTLYVDERKGVARGVLTQTLGPWRRPVAYLSKKLDPVASGWPVCLKAIAAVAILVKDADKLTLGQNITVIAPHALENIVRQPPDRWMTNARMTHYQSLLLTERVTFAPPAALNPATLLPEETDEPVTHDCHQLLIEETGVRKDLTDIPLTGEVLTWFTEGSSYVVEGKRMAGAAVVDGTRTIWASSLPEGTSAQKAELMALTQALRLAEGKSINIYTDSRYAFATAHVHGAIYKQRGLLTSAGREIKNKEEILSLLEALHLPKRLAIIHCPGHQKAKDPISRGNQMADRVAKQAAQGVNLLPMIETPKAP

SEQ ID NO: 291 - DNA, 2061 bp, synthetic construct
  misc_feature 1..2061: note = Engineered reverse transcriptase variants
  source 1..2061: mol_type = other DNA
atgcatcaccatcaccatcatggtggtagcggagtgctgacccttcagctggatgatgaatatcgcttgtacagtccgctggtcaaaccagaccaaaacattcagttctggctcgaacagtttccgcaagcgtgggctgaaactggtggcatgggcctggccaaacaggttcctcctcaggtaatccaattaaaggcatctgccacgccggtgtcagttcgtcagtatccgctgtcgaaagaagcgcaagaggggattcgcccacacgtgcagcgtttgatccagcagggcattctggtaccggttcaaagcccctggaataccccgcttttaccagtccgcaaaccgggtacaaacgattaccgtcctgtgcaagacctgcgcgaagtcaataaacgtgtgcaggatatccacccaaccgttccgaacccgtataatctgttgtgcgcgttaccgccgcagcgttcctggtacacggtgctggacctgaaggacgcgttcttctgtcttcgcctccatcccaccagccagccactgtttgcctttgaatggcgcgatcctgatacgggccgtactgggcaattaacatggacccgtttgccgcagggctttaagaacagtcccacgatctttgatgaggctcttcaccgcgacctcgcaaatttccgcatccaacacccacaggtaacgttactccagtatgtcgatgatcttttgttagcgggtgccaccaaacaggactgcttggaaggaacgaaagcacttctcttggaactctcggatttaggttatcgtgtgtccgccaagaaagctcagatttgtcgccgcgaagtgacatacttaggctattcattgcgtgatggtcaacgttggcttactgaggcgcgctggaagaccgttgttcaaatccccgcccctaagaccgcgaaacagatgcgtgaatttcttggcacggcaggtttctgccgtttgtggattcctggctttgctacgttagcggcacccctctatccactcacgaaagagaaaggagaattctcttgggccccagaacatcagaaagcgtttgacgccatcaagaaagcgttattaagcgctcctgctcttgcattgcccgatgtcaccaaaccattcacgctctacgtggatgaacgcaaaggcgtagcccgcggtgtgttgacacagaccttaggaccttggcgtcgtcccgtggcctacctctcgaagaaacttgacccagttgcaagtggttggcctgtctgcttgaaagctattgccgcagttgcaatcctcgtcaaagatgccgacaaacttactttgggccagaacattactgttattgcaccacacgcccttgaaaacatcgttcgtcagccacctgatcgctggatgaccaatgctcgcatgacgcattatcagagcctcttgcttaccgaacgcgtgacttttgctccacctgcagccttaaaccccgcaacccttttacccgaagaaacagatgagcctgtgacgcatgactgtcaccagctcttgattgaagaaactggcgtacgcaaagacctcaccgatattccattaacaggtgaggtacttacgtggtttaccgaggggtcctcttatgtcgtcgaaggcaaacgtatggctggtgccgccgttgttgatggcacccgtactatctgggcaagcagcttacccgaaggcacgagtgctcagaaagcagagttgatggccttgacccaagccttacgccttgctgaagggaaatcgatcaatatttacaccgactcacgctatgcattcgccacggcacatgtacacggtgccatctacaaacaacgtggtttgttaacttctgctggccgcgagattaagaacaaagaagaaatcctttccttacttgaagccttacacctccccaaacgtctcgctattattcattgtccagggcatcagaaagcaaaagatcctatcagccgtgggaatcaaatggcagatcgtgtcgctaaacaggcagcccaaggcgttaacttgttgcccatgattgagacccctaaagctcca

SEQ ID NO: 292 - protein, 687 aa, synthetic construct
  REGION 1..687: note = Engineered reverse transcriptase variants
MHHHHHHGGSGVLTLQLDDEYRLYSPLVKPDQNIQFWLEQFPQAWAETGGMGLAKQVPPQVIQLKASATPVSVRQYPLSKEAQEGIRPHVQRLIQQGILVPVQSPWNTPLLPVRKPGTNDYRPVQDLREVNKRVQDIHPTVPNPYNLLCALPPQRSWYTVLDLKDAFFCLRLHPTSQPLFAFEWRDPDTGRTGQLTWTRLPQGFKNSPTIFDEALHRDLANFRIQHPQVTLLQYVDDLLLAGATKQDCLEGTKALLLELSDLGYRVSAKKAQICRREVTYLGYSLRDGQRWLTEARWKTVVQIPAPKTAKQMREFLGTAGFCRLWIPGFATLAAPLYPLTKEKGEFSWAPEHQKAFDAIKKALLSAPALALPDVTKPFTLYVDERKGVARGVLTQTLGPWRRPVAYLSKKLDPVASGWPVCLKAIAAVAILVKDADKLTLGQNITVIAPHALENIVRQPPDRWMTNARMTHYQSLLLTERVTFAPPAALNPATLLPEETDEPVTHDCHQLLIEETGVRKDLTDIPLTGEVLTWFTEGSSYVVEGKRMAGAAVVDGTRTIWASSLPEGTSAQKAELMALTQALRLAEGKSINIYTDSRYAFATAHVHGAIYKQRGLLTSAGREIKNKEEILSLLEALHLPKRLAIIHCPGHQKAKDPISRGNQMADRVAKQAAQGVNLLPMIETPKAP

SEQ ID NO: 293 - DNA, 2061 bp, synthetic construct
  misc_feature 1..2061: note = Engineered reverse transcriptase variants
  source 1..2061: mol_type = other DNA
atgcatcaccatcaccatcatggtggtagcggagtgctgacccttcagctggatgatgaatatcgcttgtacagtccgctggtcaaaccagaccaaaacattcagttctggctcgaacagtttccgcaagcgtgggctgaaactggtggcatgggcctggccaaacaggttcctcctcaggtaatccaattaaaggcatctgccacgccggtgtcagttcgtcagtatccgctgtcgaaagaagcgcaagaggggattcgcccacacgtgcagcgtttgatccagcagggcattctggtaccggttcaaagcccctggaataccccgcttttaccagtccgcaaaccgggtacaaacgattaccgtcctgtgcaagacctgcgcgaagtcaataaacgtgtgcaggatatccacccaaccgttccgaacccgtataatctgttgtgcgcgttaccgccgcagcgttcctggtacacggtgctggacctgaaggacgcgttcttctgtcttcgcctccatcccaccagccagccactgtttgcctttgaatggcgcgatcctgatacgggccgtactgggcaattaacatggacccgtttgccgcagggctttaagaacagtcccacgatctttgatgaggctcttcaccgcgacctcgcaaatttccgcatccaacacccacaggtaacgttactccagtatgtcgatgatcttttgttagcgggtgccaccaaacaggactgcttggaaggaacgaaagcacttctcttggaactctcggatttaggttatcgtgtgtccgccaagaaagctcagatttgtcgccgcgaagtgacatacttaggctattcattgcgtgatggtcaacgttggcttactgaggcgcgcaagaagaccgttgttcaaatccccgcccctaagaccgcgaaacagatgcgtgaatttcttggcacgtgtggtttctgccgtttgtggattcctggctttgctacgttagcggcacccctctatccactcacgaaagagaaaggagaattctcttgggccccagaacatcagaaagcgtttgacgccatcaagaaagcgttattaagcgctcctgctcttgcattgcccgatgtcaccaaaccattcacgctctacgtggatgaacgcaaaggcgtagcccgcggtgtgttgacacagaccttaggaccttggcgtcgtcccgtggcctacctctcgaagaaacttgacccagttgcaagtggttggcctgtctgcttgaaagctattgccgcagttgcaatcctcgtcaaagatgccgacaaacttactttgggccagaacattactgttattgcaccacacgcccttgaaaacatcgttcgtcagccacctgatcgctggatgaccaatgctcgcatgacgcattatcagagcctcttgcttaccgaacgcgtgacttttgctccacctgcagccttaaaccccgcaacccttttacccgaagaaacagatgagcctgtgacgcatgactgtcaccagctcttgattgaagaaactggcgtacgcaaagacctcaccgatattccattaacaggtgaggtacttacgtggtttaccgaggggtcctcttatgtcgtcgaaggcaaacgtatggctggtgccgccgttgttgatggcacccgtactatctgggcaagcagcttacccgaaggcacgagtgctcagaaagcagagttgatggccttgacccaagccttacgccttgctgaagggaaatcgatcaatatttacaccgactcacgctatgcattcgccacggcacatgtacacggtgccatctacaaacaacgtggtttgttaacttctgctggccgcgagattaagaacaaagaagaaatcctttccttacttgaagccttacacctccccaaacgtctcgctattattcattgtccagggcatcagaaagcaaaagatcctatcagccgtgggaatcaaatggcagatcgtgtcgctaaacaggcagcccaaggcgttaacttgttgcccatgattgagacccctaaagctcca

SEQ ID NO: 294 - protein, 687 aa, synthetic construct
  REGION 1..687: note = Engineered reverse transcriptase variants
MHHHHHHGGSGVLTLQLDDEYRLYSPLVKPDQNIQFWLEQFPQAWAETGGMGLAKQVPPQVIQLKASATPVSVRQYPLSKEAQEGIRPHVQRLIQQGILVPVQSPWNTPLLPVRKPGTNDYRPVQDLREVNKRVQDIHPTVPNPYNLLCALPPQRSWYTVLDLKDAFFCLRLHPTSQPLFAFEWRDPDTGRTGQLTWTRLPQGFKNSPTIFDEALHRDLANFRIQHPQVTLLQYVDDLLLAGATKQDCLEGTKALLLELSDLGYRVSAKKAQICRREVTYLGYSLRDGQRWLTEARKKTVVQIPAPKTAKQMREFLGTCGFCRLWIPGFATLAAPLYPLTKEKGEFSWAPEHQKAFDAIKKALLSAPALALPDVTKPFTLYVDERKGVARGVLTQTLGPWRRPVAYLSKKLDPVASGWPVCLKAIAAVAILVKDADKLTLGQNITVIAPHALENIVRQPPDRWMTNARMTHYQSLLLTERVTFAPPAALNPATLLPEETDEPVTHDCHQLLIEETGVRKDLTDIPLTGEVLTWFTEGSSYVVEGKRMAGAAVVDGTRTIWASSLPEGTSAQKAELMALTQALRLAEGKSINIYTDSRYAFATAHVHGAIYKQRGLLTSAGREIKNKEEILSLLEALHLPKRLAIIHCPGHQKAKDPISRGNQMADRVAKQAAQGVNLLPMIETPKAP

SEQ ID NO: 295 - DNA, 2061 bp, synthetic construct
  misc_feature 1..2061: note = Engineered reverse transcriptase variants
  source 1..2061: mol_type = other DNA
atgcatcaccatcaccatcatggtggtagcggagtgctgacccttcagctggatgatgaatatcgcttgtacagtccgctggtcaaaccagaccaaaacattcagttctggctcgaacagtttccgcaagcgtgggctgaaactggtggcatgggcctggccaaacaggttcctcctcaggtaatccaattaaaggcatctgccacgccggtgtcagttcgtcagtatccgctgtcgaaagaagcgcaagaggggattcgcccacacgtgcagcgtttgatccagcagggcattctggtaccggttcaaagcccctggaataccccgcttttaccagtcgggaaaccgggtacaaacgattaccgtcctgtgcaagacctgcgcgaagtcaataaacgtgtgcaggatatccacccaaccgttccgaacccgtataatctgttgtgcgcgttaccgccgcagcgttcctggtacacggtgctggacctgaaggacgcgttcttctgtcttcgcctccatcccaccagccagccactgtttgcctttgaatggcgcgatcctgatacgggccgtactgggcaattaacatggacccgtttgccgcagggctttaagaacagtcccacgatctttgatgaggctcttcaccgcgacctcgcaaatttccgcatccaacacccacaggtaacgttactccagtatgtcgatgatcttttgttagcgggtgccaccaaacaggactgcttggaaggaacgaaagcacttctcttggaactctcggatttaggttatcgtgtgtccgccaagaaagctcagatttgtcgccgcgaagtgacatacttaggctattcattgcgtgatggtcaacgttggcttactgaggcgcgcaagaagaccgttgttcaaatccccgcccctaagaccgcgaaacagatgcgtgaatttcttggcacggcaggtttctgccgtttgtggattcctggctttgctacgttagcggcacccctctatccactcacgaaagagaaaggagaattctcttgggccccagaacatcagaaagcgtttgacgccatcaagaaagcgttattaagcgctcctgctcttgcattgcccgatgtcaccaaaccattcacgctctacgtggatgaacgcaaaggcgtagcccgcggtgtgttgacacagaccttaggaccttggcgtcgtcccgtggcctacctctcgaagaaacttgacccagttgcaagtggttggcctgtctgcttgaaagctattgccgcagttgcaatcctcgtcaaagatgccgacaaacttactttgggccagaacattactgttattgcaccacacgcccttgaaaacatcgttcgtcagccacctgatcgctggatgaccaatgctcgcatgacgcattatcagagcctcttgcttaccgaacgcgtgacttttgctccacctgcagccttaaaccccgcaacccttttacccgaagaaacagatgagcctgtgacgcatgactgtcaccagctcttgattgaagaaactggcgtacgcaaagacctcaccgatattccattaacaggtgaggtacttacgtggtttaccgaggggtcctcttatgtcgtcgaaggcaaacgtatggctggtgccgccgttgttgatggcacccgtactatctgggcaagcagcttacccgaaggcacgagtgctcagaaagcagagttgatggccttgacccaagccttacgccttgctgaagggaaatcgatcaatatttacaccgactcacgctatgcattcgccacggcacatgtacacggtgccatctacaaacaacgtggtttgttaacttctgctggccgcgagattaagaacaaagaagaaatcctttccttacttgaagccttacacctccccaaacgtctcgctattattcattgtccagggcatcagaaagcaaaagatcctatcagccgtgggaatcaaatggcagatcgtgtcgctaaacaggcagcccaaggcgttaacttgttgcccatgattgagacccctaaagctcca

SEQ ID NO: 296 - protein, 687 aa, synthetic construct
  REGION 1..687: note = Engineered reverse transcriptase variants
MHHHHHHGGSGVLTLQLDDEYRLYSPLVKPDQNIQFWLEQFPQAWAETGGMGLAKQVPPQVIQLKASATPVSVRQYPLSKEAQEGIRPHVQRLIQQGILVPVQSPWNTPLLPVGKPGTNDYRPVQDLREVNKRVQDIHPTVPNPYNLLCALPPQRSWYTVLDLKDAFFCLRLHPTSQPLFAFEWRDPDTGRTGQLTWTRLPQGFKNSPTIFDEALHRDLANFRIQHPQVTLLQYVDDLLLAGATKQDCLEGTKALLLELSDLGYRVSAKKAQICRREVTYLGYSLRDGQRWLTEARKKTVVQIPAPKTAKQMREFLGTAGFCRLWIPGFATLAAPLYPLTKEKGEFSWAPEHQKAFDAIKKALLSAPALALPDVTKPFTLYVDERKGVARGVLTQTLGPWRRPVAYLSKKLDPVASGWPVCLKAIAAVAILVKDADKLTLGQNITVIAPHALENIVRQPPDRWMTNARMTHYQSLLLTERVTFAPPAALNPATLLPEETDEPVTHDCHQLLIEETGVRKDLTDIPLTGEVLTWFTEGSSYVVEGKRMAGAAVVDGTRTIWASSLPEGTSAQKAELMALTQALRLAEGKSINIYTDSRYAFATAHVHGAIYKQRGLLTSAGREIKNKEEILSLLEALHLPKRLAIIHCPGHQKAKDPISRGNQMADRVAKQAAQGVNLLPMIETPKAP

SEQ ID NO: 297 - DNA, 2061 bp, synthetic construct
  misc_feature 1..2061: note = Engineered reverse transcriptase variants
  source 1..2061: mol_type = other DNA
atgcatcaccatcaccatcatggtggtagcggagtgctgacccttcagctggatgatgaatatcgcttgtacagtccgctggtcaaaccagaccaaaacattcagttctggctcgaacagtttccgcaagcgtgggctgaaactggtggcatgggcctggccaaacaggttcctcctcaggtaatccaattaaaggcatctgccacgccggtgtcagttcgtcagtatccgctgtcgaaagaagcgcaagaggggattcgcccacacgtgcagcgtttgatccagcagggcattctggtaccggttcaaagcccctggaataccccgcttttaccagtccgcaaaccgggtacaaacgattaccgtcctgtgcaagacctgcgcgaagtcaataaacgtgtgcaggatatccacccaaccgttccgaacccgtataatctgttgtgcgcgttaccgccgcagcgttcctggtacacggtgctggacctgaaggacgcgttcttctgtcttcgcctccatcccaccagccagccactgtttgcctttgaatggcgcgatcctgatacgggccgtactgggcaattaacatggacccgtttgccgcagggctttaagaacagtcccacgatctttgatgaggctcttcaccgcgacctcgcaaatttccgcatccaacacccacaggtaacgttactccagtatgtcgatgatcttttgttagcgggtgccaccaaacaggactgcttggaaggaacgaaagcacttctcttggaactctcggatttaggttatcgtgtgtccgccaagaaagctcagatttgtcgccgcgaagtgacatacttaggctattcattgcgtgatggtcaacgttggcttactgaggcgcgcaagaagaccgttgttcaaatccccgcccctaagggtgcgaaacagatgcgtgaatttcttggcacggcaggtttctgccgtttgtggattcctggctttgctacgttagcggcacccctctatccactcacgaaagagaaaggagaattctcttgggccccagaacatcagaaagcgtttgacgccatcaagaaagcgttattaagcgctcctgctcttgcattgcccgatgtcaccaaaccattcacgctctacgtggatgaacgcaaaggcgtagcccgcggtgtgttgacacagaccttaggaccttggcgtcgtcccgtggcctacctctcgaagaaacttgacccagttgcaagtggttggcctgtctgcttgaaagctattgccgcagttgcaatcctcgtcaaagatgccgacaaacttactttgggccagaacattactgttattgcaccacacgcccttgaaaacatcgttcgtcagccacctgatcgctggatgaccaatgctcgcatgacgcattatcagagcctcttgcttaccgaacgcgtgacttttgctccacctgcagccttaaaccccgcaacccttttacccgaagaaacagatgagcctgtgacgcatgactgtcaccagctcttgattgaagaaactggcgtacgcaaagacctcaccgatattccattaacaggtgaggtacttacgtggtttaccgaggggtcctcttatgtcgtcgaaggcaaacgtatggctggtgccgccgttgttgatggcacccgtactatctgggcaagcagcttacccgaaggcacgagtgctcagaaagcagagttgatggccttgacccaagccttacgccttgctgaagggaaatcgatcaatatttacaccgactcacgctatgcattcgccacggcacatgtacacggtgccatctacaaacaacgtggtttgttaacttctgctggccgcgagattaagaacaaagaagaaatcctttccttacttgaagccttacacctccccaaacgtctcgctattattcattgtccagggcatcagaaagcaaaagatcctatcagccgtgggaatcaaatggcagatcgtgtcgctaaacaggcagcccaaggcgttaacttgttgcccatgattgagacccctaaagctcca

SEQ ID NO: 298 - protein, 687 aa, synthetic construct
  REGION 1..687: note = Engineered reverse transcriptase variants
MHHHHHHGGSGVLTLQLDDEYRLYSPLVKPDQNIQFWLEQFPQAWAETGGMGLAKQVPPQVIQLKASATPVSVRQYPLSKEAQEGIRPHVQRLIQQGILVPVQSPWNTPLLPVRKPGTNDYRPVQDLREVNKRVQDIHPTVPNPYNLLCALPPQRSWYTVLDLKDAFFCLRLHPTSQPLFAFEWRDPDTGRTGQLTWTRLPQGFKNSPTIFDEALHRDLANFRIQHPQVTLLQYVDDLLLAGATKQDCLEGTKALLLELSDLGYRVSAKKAQICRREVTYLGYSLRDGQRWLTEARKKTVVQIPAPKGAKQMREFLGTAGFCRLWIPGFATLAAPLYPLTKEKGEFSWAPEHQKAFDAIKKALLSAPALALPDVTKPFTLYVDERKGVARGVLTQTLGPWRRPVAYLSKKLDPVASGWPVCLKAIAAVAILVKDADKLTLGQNITVIAPHALENIVRQPPDRWMTNARMTHYQSLLLTERVTFAPPAALNPATLLPEETDEPVTHDCHQLLIEETGVRKDLTDIPLTGEVLTWFTEGSSYVVEGKRMAGAAVVDGTRTIWASSLPEGTSAQKAELMALTQALRLAEGKSINIYTDSRYAFATAHVHGAIYKQRGLLTSAGREIKNKEEILSLLEALHLPKRLAIIHCPGHQKAKDPISRGNQMADRVAKQAAQGVNLLPMIETPKAP

SEQ ID NO: 299 - DNA, 2061 bp, synthetic construct
  misc_feature 1..2061: note = Engineered reverse transcriptase variants
  source 1..2061: mol_type = other DNA
atgcatcaccatcaccatcatggtggtagcggagtgctgacccttcagctggatgatgaatatcgcttgtacagtccgctggtcaaaccagaccaaaacattcagttctggctcgaacagtttccgcaagcgtgggctgaaactggtggcatgggcctggccaaacaggttcctcctcaggtaatccaattaaaggcatctgccacgccggtgtcagttcgtcagtatccgctgtcgaaagaagcgcaagaggggattcgcccacacgtgcagcgtttgatccagcagggcattctggtaccggttcaaagcccctggaataccccgcttttaccagtccgcaaaccgggtacaaacgattaccgtcctgtgcaagacctgcgcgaagtcaataaacgtgtgcaggatatccacccaaccgttccgaacccgtataatctgttgtgcgcgttaccgccgcagcgttcctggtacacggtgctggacctgaaggacgcgttcttctgtcttcgcctccatcccaccagccagccactgtttgcctttgaatggcgcgatcctgatacgggccgtactgggcaattaacatggacccgtttgccgcagggctttaagaacagtcccacgatctttgatgaggctcttcaccgcgacctcgcaaatttccgcatccaacacccacaggtaacgttactccagtatgtcgatgatcttttgttagcgggtgccaccaaacaggactgcttggaaggaacgaaagcacttctcttggaactctcggatttaggttatcgtgtgtccgccaagaaagctcagatttgtcgccgcgaagtgacatacttaggctattcattgcgtgatggtcaacgttggcttactgaggcgcgcaagaagaccgttgttcaaatccccgcccctaagaccgagaaacagatgcgtgaatttcttggcacggcaggtttctgccgtttgtggattcctggctttgctacgttagcggcacccctctatccactcacgaaagagaaaggagaattctcttgggccccagaacatcagaaagcgtttgacgccatcaagaaagcgttattaagcgctcctgctcttgcattgcccgatgtcaccaaaccattcacgctctacgtggatgaacgcaaaggcgtagcccgcggtgtgttgacacagaccttaggaccttggcgtcgtcccgtggcctacctctcgaagaaacttgacccagttgcaagtggttggcctgtctgcttgaaagctattgccgcagttgcaatcctcgtcaaagatgccgacaaacttactttgggccagaacattactgttattgcaccacacgcccttgaaaacatcgttcgtcagccacctgatcgctggatgaccaatgctcgcatgacgcattatcagagcctcttgcttaccgaacgcgtgacttttgctccacctgcagccttaaaccccgcaacccttttacccgaagaaacagatgagcctgtgacgcatgactgtcaccagctcttgattgaagaaactggcgtacgcaaagacctcaccgatattccattaacaggtgaggtacttacgtggtttaccgaggggtcctcttatgtcgtcgaaggcaaacgtatggctggtgccgccgttgttgatggcacccgtactatctgggcaagcagcttacccgaaggcacgagtgctcagaaagcagagttgatggccttgacccaagccttacgccttgctgaagggaaatcgatcaatatttacaccgactcacgctatgcattcgccacggcacatgtacacggtgccatctacaaacaacgtggtttgttaacttctgctggccgcgagattaagaacaaagaagaaatcctttccttacttgaagccttacacctccccaaacgtctcgctattattcattgtccagggcatcagaaagcaaaagatcctatcagccgtgggaatcaaatggcagatcgtgtcgctaaacaggcagcccaaggcgttaacttgttgcccatgattgagacccctaaagctcca

SEQ ID NO: 300 - protein, 687 aa, synthetic construct
  REGION 1..687: note = Engineered reverse transcriptase variants
MHHHHHHGGSGVLTLQLDDEYRLYSPLVKPDQNIQFWLEQFPQAWAETGGMGLAKQVPPQVIQLKASATPVSVRQYPLSKEAQEGIRPHVQRLIQQGILVPVQSPWNTPLLPVRKPGTNDYRPVQDLREVNKRVQDIHPTVPNPYNLLCALPPQRSWYTVLDLKDAFFCLRLHPTSQPLFAFEWRDPDTGRTGQLTWTRLPQGFKNSPTIFDEALHRDLANFRIQHPQVTLLQYVDDLLLAGATKQDCLEGTKALLLELSDLGYRVSAKKAQICRREVTYLGYSLRDGQRWLTEARKKTVVQIPAPKTEKQMREFLGTAGFCRLWIPGFATLAAPLYPLTKEKGEFSWAPEHQKAFDAIKKALLSAPALALPDVTKPFTLYVDERKGVARGVLTQTLGPWRRPVAYLSKKLDPVASGWPVCLKAIAAVAILVKDADKLTLGQNITVIAPHALENIVRQPPDRWMTNARMTHYQSLLLTERVTFAPPAALNPATLLPEETDEPVTHDCHQLLIEETGVRKDLTDIPLTGEVLTWFTEGSSYVVEGKRMAGAAVVDGTRTIWASSLPEGTSAQKAELMALTQALRLAEGKSINIYTDSRYAFATAHVHGAIYKQRGLLTSAGREIKNKEEILSLLEALHLPKRLAIIHCPGHQKAKDPISRGNQMADRVAKQAAQGVNLLPMIETPKAP

SEQ ID NO: 301 - DNA, 2061 bp, synthetic construct
  misc_feature 1..2061: note = Engineered reverse transcriptase variants
  source 1..2061: mol_type = other DNA
atgcatcaccatcaccatcatggtggtagcggagtgctgacccttcagctggatgatgaatatcgcttgtacagtccgctggtcaaaccagaccaaaacattcagttctggctcgaacagtttccgcaagcgtgggctgaaactggtggcatgggcctggccaaacaggttcctcctcaggtaatccaattaaaggcatctgccacgccggtgtcagttcgtcagtatccgctgtcgaaagaagcgcaagaggggattcgcccacacgtgcagcgtttgatccagcagggcattctggtaccggttcaaagcccctggaataccccgcttttaccagtccgcaaaccgggtacaaacgattaccgtcctgtgcaagacctgcgcgaagtcaataaacgtgtgcaggatatccacccaaccgttccgaacccgtataatctgttgtgcgcgttaccgccgcagcgttcctggtacacggtgctggacctgaaggacgcgttcttctgtcttcgcctccatcccaccagccagccactgtttgcctttgaatggcgcgatcctgatacgggccgtactgggcaattaacatggacccgtttgccgcagggctttaagaacagtcccacgatctttgatgaggctcttcaccgcgacctcgcaaatttccgcatccaacacccacaggtaacgttactccagtatgtcgatgatcttttgttagcgggtgccaccaaacaggactgcttggaaggaacgaaagcacttctcttggaactctcggatttaggttatcgtgtgtccgccaagaaagctcagatttgtcgccgcgaagtgacatacttaggctattcattgcgtgatggtcaacgttggcttactgaggcgcgcaagaagaccgttgttcaaatccccgcccctaagaccgcgaaacagatgcgtgaatttcttggcacggcaggtttctgccgtttgtggattcctggctttgctacgttagcggcacccctctatccactcacgaaatggaaaggagaattctcttgggccccagaacatcagaaagcgtttgacgccatcaagaaagcgttattaagcgctcctgctcttgcattgcccgatgtcaccaaaccattcacgctctacgtggatgaacgcaaaggcgtagcccgcggtgtgttgacacagaccttaggaccttggcgtcgtcccgtggcctacctctcgaagaaacttgacccagttgcaagtggttggcctgtctgcttgaaagctattgccgcagttgcaatcctcgtcaaagatgccgacaaacttactttgggccagaacattactgttattgcaccacacgcccttgaaaacatcgttcgtcagccacctgatcgctggatgaccaatgctcgcatgacgcattatcagagcctcttgcttaccgaacgcgtgacttttgctccacctgcagccttaaaccccgcaacccttttacccgaagaaacagatgagcctgtgacgcatgactgtcaccagctcttgattgaagaaactggcgtacgcaaagacctcaccgatattccattaacaggtgaggtacttacgtggtttaccgaggggtcctcttatgtcgtcgaaggcaaacgtatggctggtgccgccgttgttgatggcacccgtactatctgggcaagcagcttacccgaaggcacgagtgctcagaaagcagagttgatggccttgacccaagccttacgccttgctgaagggaaatcgatcaatatttacaccgactcacgctatgcattcgccacggcacatgtacacggtgccatctacaaacaacgtggtttgttaacttctgctggccgcgagattaagaacaaagaagaaatcctttccttacttgaagccttacacctccccaaacgtctcgctattattcattgtccagggcatcagaaagcaaaagatcctatcagccgtgggaatcaaatggcagatcgtgtcgctaaacaggcagcccaaggcgttaacttgttgcccatgattgagacccctaaagctcca

SEQ ID NO: 302 - protein, 687 aa, synthetic construct
  REGION 1..687: note = Engineered reverse transcriptase variants
MHHHHHHGGSGVLTLQLDDEYRLYSPLVKPDQNIQFWLEQFPQAWAETGGMGLAKQVPPQVIQLKASATPVSVRQYPLSKEAQEGIRPHVQRLIQQGILVPVQSPWNTPLLPVRKPGTNDYRPVQDLREVNKRVQDIHPTVPNPYNLLCALPPQRSWYTVLDLKDAFFCLRLHPTSQPLFAFEWRDPDTGRTGQLTWTRLPQGFKNSPTIFDEALHRDLANFRIQHPQVTLLQYVDDLLLAGATKQDCLEGTKALLLELSDLGYRVSAKKAQICRREVTYLGYSLRDGQRWLTEARKKTVVQIPAPKTAKQMREFLGTAGFCRLWIPGFATLAAPLYPLTKWKGEFSWAPEHQKAFDAIKKALLSAPALALPDVTKPFTLYVDERKGVARGVLTQTLGPWRRPVAYLSKKLDPVASGWPVCLKAIAAVAILVKDADKLTLGQNITVIAPHALENIVRQPPDRWMTNARMTHYQSLLLTERVTFAPPAALNPATLLPEETDEPVTHDCHQLLIEETGVRKDLTDIPLTGEVLTWFTEGSSYVVEGKRMAGAAVVDGTRTIWASSLPEGTSAQKAELMALTQALRLAEGKSINIYTDSRYAFATAHVHGAIYKQRGLLTSAGREIKNKEEILSLLEALHLPKRLAIIHCPGHQKAKDPISRGNQMADRVAKQAAQGVNLLPMIETPKAP

SEQ ID NO: 303 - DNA, 2061 bp, synthetic construct
  misc_feature 1..2061: note = Engineered reverse transcriptase variants
  source 1..2061: mol_type = other DNA
atgcatcaccatcaccatcatggtggtagcggagtgctgacccttcagctggatgatgaatatcgcttgtacagtccgctggtcaaaccagaccaaaacattcagttctggctcgaacagtttccgcaagcgtgggctgaaactggtggcatgggcctggccaaacaggttcctcctcaggtaatccaattaaaggcatctgccacgccggtgtcagttcgtcagtatccgctgtcgaaagaagcgcaagaggggattcgcccacacgtgcagcgtttgatccagcagggcattctggtaccggttcaaagcccctggaataccccgcttttaccagtccgcaaaccgggtacaaacgattaccgtcctgtgcaagacctgcgcgaagtcaataaacgtgtgcaggatatccacccaaccgttccgaacccgtataatctgttgtgcgcgttaccgccgcagcgttcctggtacacggtgctggacctgaaggacgcgttcttctgtcttcgcctccatcccaccagccagccactgtttgcctttgaatggcgcgatcctgatacgggccgtactgggcaattaacatggacccgtttgccgcagggctttatgaacagtcccacgatctttgatgaggctcttcaccgcgacctcgcaaatttccgcatccaacacccacaggtaacgttactccagtatgtcgatgatcttttgttagcgggtgccaccaaacaggactgcttggaaggaacgaaagcacttctcttggaactctcggatttaggttatcgtgtgtccgccaagaaagctcagatttgtcgccgcgaagtgacatacttaggctattcattgcgtgatggtcaacgttggcttactgaggcgcgcaagaagaccgttgttcaaatccccgcccctaagaccgcgaaacagatgcgtgaatttcttggcacggcaggtttctgccgtttgtggattcctggctttgctacgttagcggcacccctctatccactcacgaaagagaaaggagaattctcttgggccccagaacatcagaaagcgtttgacgccatcaagaaagcgttattaagcgctcctgctcttgcattgcccgatgtcaccaaaccattcacgctctacgtggatgaacgcaaaggcgtagcccgcggtgtgttgacacagaccttaggaccttggcgtcgtcccgtggcctacctctcgaagaaacttgacccagttgcaagtggttggcctgtctgcttgaaagctattgccgcagttgcaatcctcgtcaaagatgccgacaaacttactttgggccagaacattactgttattgcaccacacgcccttgaaaacatcgttcgtcagccacctgatcgctggatgaccaatgctcgcatgacgcattatcagagcctcttgcttaccgaacgcgtgacttttgctccacctgcagccttaaaccccgcaacccttttacccgaagaaacagatgagcctgtgacgcatgactgtcaccagctcttgattgaagaaactggcgtacgcaaagacctcaccgatattccattaacaggtgaggtacttacgtggtttaccgaggggtcctcttatgtcgtcgaaggcaaacgtatggctggtgccgccgttgttgatggcacccgtactatctgggcaagcagcttacccgaaggcacgagtgctcagaaagcagagttgatggccttgacccaagccttacgccttgctgaagggaaatcgatcaatatttacaccgactcacgctatgcattcgccacggcacatgtacacggtgccatctacaaacaacgtggtttgttaacttctgctggccgcgagattaagaacaaagaagaaatcctttccttacttgaagccttacacctccccaaacgtctcgctattattcattgtccagggcatcagaaagcaaaagatcctatcagccgtgggaatcaaatggcagatcgtgtcgctaaacaggcagcccaaggcgttaacttgttgcccatgattgagacccctaaagctcca

SEQ ID NO: 304 - protein, 687 aa, synthetic construct
  REGION 1..687: note = Engineered reverse transcriptase variants
MHHHHHHGGSGVLTLQLDDEYRLYSPLVKPDQNIQFWLEQFPQAWAETGGMGLAKQVPPQVIQLKASATPVSVRQYPLSKEAQEGIRPHVQRLIQQGILVPVQSPWNTPLLPVRKPGTNDYRPVQDLREVNKRVQDIHPTVPNPYNLLCALPPQRSWYTVLDLKDAFFCLRLHPTSQPLFAFEWRDPDTGRTGQLTWTRLPQGFMNSPTIFDEALHRDLANFRIQHPQVTLLQYVDDLLLAGATKQDCLEGTKALLLELSDLGYRVSAKKAQICRREVTYLGYSLRDGQRWLTEARKKTVVQIPAPKTAKQMREFLGTAGFCRLWIPGFATLAAPLYPLTKEKGEFSWAPEHQKAFDAIKKALLSAPALALPDVTKPFTLYVDERKGVARGVLTQTLGPWRRPVAYLSKKLDPVASGWPVCLKAIAAVAILVKDADKLTLGQNITVIAPHALENIVRQPPDRWMTNARMTHYQSLLLTERVTFAPPAALNPATLLPEETDEPVTHDCHQLLIEETGVRKDLTDIPLTGEVLTWFTEGSSYVVEGKRMAGAAVVDGTRTIWASSLPEGTSAQKAELMALTQALRLAEGKSINIYTDSRYAFATAHVHGAIYKQRGLLTSAGREIKNKEEILSLLEALHLPKRLAIIHCPGHQKAKDPISRGNQMADRVAKQAAQGVNLLPMIETPKAP

SEQ ID NO: 305 - DNA, 2061 bp, synthetic construct
  misc_feature 1..2061: note = Engineered reverse transcriptase variants
  source 1..2061: mol_type = other DNA
atgcatcaccatcaccatcatggtggtagcggagtgctgacccttcagctggatgatgaatatcgcttgtacagtccgctggtcaaaccagaccaaaacattcagttctggctcgaacagtttccgcaagcgtgggctgaaactggtggcatgggcctggccaaacaggttcctcctcaggtaatccaattaaaggcatctgccacgccggtgtcagttcgtcagtatccgctgtcgaaagaagcgcaagaggggattcgcccacacgtgcagcgtttgatccagcagggcattctggtaccggttcaaagcccctggaataccccgcttttaccagtccgcaaaccgggtacaaacgattaccgtcctgtgcaagacctgcgcgaagtcaataaacgtgtgcaggatatccacccaaccgttccgaacccgtataatctgttgtgcgcgttaccgccgcagcgttcctggtacacggtgctggacctgaaggacgcgttcttctgtcttcgcctccatcccaccagccagccactgtttgcctttgaatggcgcgatcctgatacgggccgtactgggcaattaacatggacccgtttgccgcagggctttaagaacagtcccacgatctttaaggaggctcttcaccgcgacctcgcaaatttccgcatccaacacccacaggtaacgttactccagtatgtcgatgatcttttgttagcgggtgccaccaaacaggactgcttggaaggaacgaaagcacttctcttggaactctcggatttaggttatcgtgtgtccgccaagaaagctcagatttgtcgccgcgaagtgacatacttaggctattcattgcgtgatggtcaacgttggcttactgaggcgcgcaagaagaccgttgttcaaatccccgcccctaagaccgcgaaacagatgcgtgaatttcttggcacggcaggtttctgccgtttgtggattcctggctttgctacgttagcggcacccctctatccactcacgaaagagaaaggagaattctcttgggccccagaacatcagaaagcgtttgacgccatcaagaaagcgttattaagcgctcctgctcttgcattgcccgatgtcaccaaaccattcacgctctacgtggatgaacgcaaaggcgtagcccgcggtgtgttgacacagaccttaggaccttggcgtcgtcccgtggcctacctctcgaagaaacttgacccagttgcaagtggttggcctgtctgcttgaaagctattgccgcagttgcaatcctcgtcaaagatgccgacaaacttactttgggccagaacattactgttattgcaccacacgcccttgaaaacatcgttcgtcagccacctgatcgctggatgaccaatgctcgcatgacgcattatcagagcctcttgcttaccgaacgcgtgacttttgctccacctgcagccttaaaccccgcaacccttttacccgaagaaacagatgagcctgtgacgcatgactgtcaccagctcttgattgaagaaactggcgtacgcaaagacctcaccgatattccattaacaggtgaggtacttacgtggtttaccgaggggtcctcttatgtcgtcgaaggcaaacgtatggctggtgccgccgttgttgatggcacccgtactatctgggcaagcagcttacccgaaggcacgagtgctcagaaagcagagttgatggccttgacccaagccttacgccttgctgaagggaaatcgatcaatatttacaccgactcacgctatgcattcgccacggcacatgtacacggtgccatctacaaacaacgtggtttgttaacttctgctggccgcgagattaagaacaaagaagaaatcctttccttacttgaagccttacacctccccaaacgtctcgctattattcattgtccagggcatcagaaagcaaaagatcctatcagccgtgggaatcaaatggcagatcgtgtcgctaaacaggcagcccaaggcgttaacttgttgcccatgattgagacccctaaagctcca

SEQ ID NO: 306 - protein, 687 aa, synthetic construct
  REGION 1..687: note = Engineered reverse transcriptase variants
MHHHHHHGGSGVLTLQLDDEYRLYSPLVKPDQNIQFWLEQFPQAWAETGGMGLAKQVPPQVIQLKASATPVSVRQYPLSKEAQEGIRPHVQRLIQQGILVPVQSPWNTPLLPVRKPGTNDYRPVQDLREVNKRVQDIHPTVPNPYNLLCALPPQRSWYTVLDLKDAFFCLRLHPTSQPLFAFEWRDPDTGRTGQLTWTRLPQGFKNSPTIFKEALHRDLANFRIQHPQVTLLQYVDDLLLAGATKQDCLEGTKALLLELSDLGYRVSAKKAQICRREVTYLGYSLRDGQRWLTEARKKTVVQIPAPKTAKQMREFLGTAGFCRLWIPGFATLAAPLYPLTKEKGEFSWAPEHQKAFDAIKKALLSAPALALPDVTKPFTLYVDERKGVARGVLTQTLGPWRRPVAYLSKKLDPVASGWPVCLKAIAAVAILVKDADKLTLGQNITVIAPHALENIVRQPPDRWMTNARMTHYQSLLLTERVTFAPPAALNPATLLPEETDEPVTHDCHQLLIEETGVRKDLTDIPLTGEVLTWFTEGSSYVVEGKRMAGAAVVDGTRTIWASSLPEGTSAQKAELMALTQALRLAEGKSINIYTDSRYAFATAHVHGAIYKQRGLLTSAGREIKNKEEILSLLEALHLPKRLAIIHCPGHQKAKDPISRGNQMADRVAKQAAQGVNLLPMIETPKAP

SEQ ID NO: 307 - DNA, 2061 bp, synthetic construct
  misc_feature 1..2061: note = Engineered reverse transcriptase variants
  source 1..2061: mol_type = other DNA
atgcatcaccatcaccatcatggtggtagcggagtgctgacccttcagctggatgatgaatatcgcttgtacagtccgctggtcaaaccagaccaaaacattcagttctggctcgaacagtttccgcaagcgtgggctgaaactggtggcatgggcctggccaaacaggttcctcctcaggtaatccaattaaaggcatctgccacgccggtgtcagttcgtcagtatccgctgtcgaaagaagcgcaagaggggattcgcccacacgtgcagcgtttgatccagcagggcattctggtaccggttcaaagcccctggaataccccgcttttaccagtccgcaaaccgggtacaaacgattaccgtcctgtgcaagacctgcgcgaagtcaataaacgtgtgcaggatatccacccaaccgttccgaacccgtataatctgttgtgcgcgttaccgccgcagcgttcctggtacacggtgctggacctgaaggacgcgttcttctgtcttcgcctccatcccaccagccagccactgtttgcctttgaatggcgcgatcctgatacgggccgtactgggcaattaacatggacccttttgccgcagggctttaagaacagtcccacgatctttgatgaggctcttcaccgcgacctcgcaaatttccgcatccaacacccacaggtaacgttactccagtatgtcgatgatcttttgttagcgggtgccaccaaacaggactgcttggaaggaacgaaagcacttctcttggaactctcggatttaggttatcgtgtgtccgccaagaaagctcagatttgtcgccgcgaagtgacatacttaggctattcattgcgtgatggtcaacgttggcttactgaggcgcgcaagaagaccgttgttcaaatccccgcccctaagaccgcgaaacagatgcgtgaatttcttggcacggcaggtttctgccgtttgtggattcctggctttgctacgttagcggcacccctctatccactcacgaaagagaaaggagaattctcttgggccccagaacatcagaaagcgtttgacgccatcaagaaagcgttattaagcgctcctgctcttgcattgcccgatgtcaccaaaccattcacgctctacgtggatgaacgcaaaggcgtagcccgcggtgtgttgacacagaccttaggaccttggcgtcgtcccgtggcctacctctcgaagaaacttgacccagttgcaagtggttggcctgtctgcttgaaagctattgccgcagttgcaatcctcgtcaaagatgccgacaaacttactttgggccagaacattactgttattgcaccacacgcccttgaaaacatcgttcgtcagccacctgatcgctggatgaccaatgctcgcatgacgcattatcagagcctcttgcttaccgaacgcgtgacttttgctccacctgcagccttaaaccccgcaacccttttacccgaagaaacagatgagcctgtgacgcatgactgtcaccagctcttgattgaagaaactggcgtacgcaaagacctcaccgatattccattaacaggtgaggtacttacgtggtttaccgaggggtcctcttatgtcgtcgaaggcaaacgtatggctggtgccgccgttgttgatggcacccgtactatctgggcaagcagcttacccgaaggcacgagtgctcagaaagcagagttgatggccttgacccaagccttacgccttgctgaagggaaatcgatcaatatttacaccgactcacgctatgcattcgccacggcacatgtacacggtgccatctacaaacaacgtggtttgttaacttctgctggccgcgagattaagaacaaagaagaaatcctttccttacttgaagccttacacctccccaaacgtctcgctattattcattgtccagggcatcagaaagcaaaagatcctatcagccgtgggaatcaaatggcagatcgtgtcgctaaacaggcagcccaaggcgttaacttgttgcccatgattgagacccctaaagctcca

SEQ ID NO: 308 - protein, 687 aa, synthetic construct
  REGION 1..687: note = Engineered reverse transcriptase variants
MHHHHHHGGSGVLTLQLDDEYRLYSPLVKPDQNIQFWLEQFPQAWAETGGMGLAKQVPPQVIQLKASATPVSVRQYPLSKEAQEGIRPHVQRLIQQGILVPVQSPWNTPLLPVRKPGTNDYRPVQDLREVNKRVQDIHPTVPNPYNLLCALPPQRSWYTVLDLKDAFFCLRLHPTSQPLFAFEWRDPDTGRTGQLTWTLLPQGFKNSPTIFDEALHRDLANFRIQHPQVTLLQYVDDLLLAGATKQDCLEGTKALLLELSDLGYRVSAKKAQICRREVTYLGYSLRDGQRWLTEARKKTVVQIPAPKTAKQMREFLGTAGFCRLWIPGFATLAAPLYPLTKEKGEFSWAPEHQKAFDAIKKALLSAPALALPDVTKPFTLYVDERKGVARGVLTQTLGPWRRPVAYLSKKLDPVASGWPVCLKAIAAVAILVKDADKLTLGQNITVIAPHALENIVRQPPDRWMTNARMTHYQSLLLTERVTFAPPAALNPATLLPEETDEPVTHDCHQLLIEETGVRKDLTDIPLTGEVLTWFTEGSSYVVEGKRMAGAAVVDGTRTIWASSLPEGTSAQKAELMALTQALRLAEGKSINIYTDSRYAFATAHVHGAIYKQRGLLTSAGREIKNKEEILSLLEALHLPKRLAIIHCPGHQKAKDPISRGNQMADRVAKQAAQGVNLLPMIETPKAP

SEQ ID NO: 309 - DNA, 2061 bp, synthetic construct
  misc_feature 1..2061: note = Engineered reverse transcriptase variants
  source 1..2061: mol_type = other DNA
atgcatcaccatcaccatcatggtggtagcggagtgctgacccttcagctggatgatgaatatcgcttgtacagtccgctggtcaaaccagaccaaaacattcagttctggctcgaacagtttccgcaagcgtgggctgaaactggtggcatgggcctggccaaacaggttcctcctcaggtaatccaattaaaggcatctgccacgccggtgtcagttcgtcagtatccgctgtcgaaagaagcgtgtgaggggattcgcccacacgtgcagcgtttgatccagcagggcattctggtaccggttcaaagcccctggaataccccgcttttaccagtccgcaaaccgggtacaaacgattaccgtcctgtgcaagacctgcgcgaagtcaataaacgtgtgcaggatatccacccaaccgttccgaacccgtataatctgttgtgcgcgttaccgccgcagcgttcctggtacacggtgctggacctgaaggacgcgttcttctgtcttcgcctccatcccaccagccagccactgtttgcctttgaatggcgcgatcctgatacgggccgtactgggcaattaacatggacccgtttgccgcagggctttaagaacagtcccacgatctttgatgaggctcttcaccgcgacctcgcaaatttccgcatccaacacccacaggtaacgttactccagtatgtcgatgatcttttgttagcgggtgccaccaaacaggactgcttggaaggaacgaaagcacttctcttggaactctcggatttaggttatcgtgtgtccgccaagaaagctcagatttgtcgccgcgaagtgacatacttaggctattcattgcgtgatggtcaacgttggcttactgaggcgcgcaagaagaccgttgttcaaatccccgcccctaagaccgcgaaacagatgcgtgaatttcttggcacggcaggtttctgccgtttgtggattcctggctttgctacgttagcggcacccctctatccactcacgaaagagaaaggagaattctcttgggccccagaacatcagaaagcgtttgacgccatcaagaaagcgttattaagcgctcctgctcttgcattgcccgatgtcaccaaaccattcacgctctacgtggatgaacgcaaaggcgtagcccgcggtgtgttgacacagaccttaggaccttggcgtcgtcccgtggcctacctctcgaagaaacttgacccagttgcaagtggttggcctgtctgcttgaaagctattgccgcagttgcaatcctcgtcaaagatgccgacaaacttactttgggccagaacattactgttattgcaccacacgcccttgaaaacatcgttcgtcagccacctgatcgctggatgaccaatgctcgcatgacgcattatcagagcctcttgcttaccgaacgcgtgacttttgctccacctgcagccttaaaccccgcaacccttttacccgaagaaacagatgagcctgtgacgcatgactgtcaccagctcttgattgaagaaactggcgtacgcaaagacctcaccgatattccattaacaggtgaggtacttacgtggtttaccgaggggtcctcttatgtcgtcgaaggcaaacgtatggctggtgccgccgttgttgatggcacccgtactatctgggcaagcagcttacccgaaggcacgagtgctcagaaagcagagttgatggccttgacccaagccttacgccttgctgaagggaaatcgatcaatatttacaccgactcacgctatgcattcgccacggcacatgtacacggtgccatctacaaacaacgtggtttgttaacttctgctggccgcgagattaagaacaaagaagaaatcctttccttacttgaagccttacacctccccaaacgtctcgctattattcattgtccagggcatcagaaagcaaaagatcctatcagccgtgggaatcaaatggcagatcgtgtcgctaaacaggcagcccaaggcgttaacttgttgcccatgattgagacccctaaagctcca

SEQ ID NO: 310 - protein, 687 aa, synthetic construct
  REGION 1..687: note = Engineered reverse transcriptase variants
MHHHHHHGGSGVLTLQLDDEYRLYSPLVKPDQNIQFWLEQFPQAWAETGGMGLAKQVPPQVIQLKASATPVSVRQYPLSKEACEGIRPHVQRLIQQGILVPVQSPWNTPLLPVRKPGTNDYRPVQDLREVNKRVQDIHPTVPNPYNLLCALPPQRSWYTVLDLKDAFFCLRLHPTSQPLFAFEWRDPDTGRTGQLTWTRLPQGFKNSPTIFDEALHRDLANFRIQHPQVTLLQYVDDLLLAGATKQDCLEGTKALLLELSDLGYRVSAKKAQICRREVTYLGYSLRDGQRWLTEARKKTVVQIPAPKTAKQMREFLGTAGFCRLWIPGFATLAAPLYPLTKEKGEFSWAPEHQKAFDAIKKALLSAPALALPDVTKPFTLYVDERKGVARGVLTQTLGPWRRPVAYLSKKLDPVASGWPVCLKAIAAVAILVKDADKLTLGQNITVIAPHALENIVRQPPDRWMTNARMTHYQSLLLTERVTFAPPAALNPATLLPEETDEPVTHDCHQLLIEETGVRKDLTDIPLTGEVLTWFTEGSSYVVEGKRMAGAAVVDGTRTIWASSLPEGTSAQKAELMALTQALRLAEGKSINIYTDSRYAFATAHVHGAIYKQRGLLTSAGREIKNKEEILSLLEALHLPKRLAIIHCPGHQKAKDPISRGNQMADRVAKQAAQGVNLLPMIETPKAP

SEQ ID NO: 311 - DNA, 2061 bp, synthetic construct
  misc_feature 1..2061: note = Engineered reverse transcriptase variants
  source 1..2061: mol_type = other DNA
atgcatcaccatcaccatcatggtggtagcggagtgctgacccttcagctggatgatgaatatcgcttgtacagtccgctggtcaaaccagaccaaaacattcagttctggctcgaacagtttccgcaagcgtgggctgaaactggtggcatgggcctggccaaacaggttcctcctcaggtaatccaattaaaggcatctgccacgccggtgtcagttcgtcagtatccgctgtcgaaagaagcgcaagaggggattcgcccacacgtgcagcgtttgatccagcagggcattctggtaccggttcaaagcccctggaataccccgcttttaccagtccgcaaaccgggtacaaacgattaccgtcctgtgcaagacctgcgcgaagtcaataaacgtgtgcaggatatccacccaaccgttccgaacccgtataatctgttgtgcgcgttaccgccgcagcgttcctggtacacggtgctggacctgaaggacgcgttcttctgtcttcgcctccatcccaccagccagccactgtttgcctttgaatggcgcgatcctgatacgggccgtactgggcaattaacatggacccgtttgccgcagggctttaagaacagtcccacgatctttgatgaggctcttcaccgcgacctcgcaaatttccgcatccaacacccacaggtaacgttactccagtatgtcgatgatcttttgttagcgggtgccaccaaacaggactgcttggaaggaacgaaagcacttctcttggaactctcggatttaggttatcgtgtgtccgccaagaaagctcagatttgtcgccgcgaagtgacatacttaggctattcattgcgtgatggtcaacgttggcttactgaggcgcgcaagaagaccgttgttcaagggcccgcccctaagaccgcgaaacagatgcgtgaatttcttggcacggcaggtttctgccgtttgtggattcctggctttgctacgttagcggcacccctctatccactcacgaaagagaaaggagaattctcttgggccccagaacatcagaaagcgtttgacgccatcaagaaagcgttattaagcgctcctgctcttgcattgcccgatgtcaccaaaccattcacgctctacgtggatgaacgcaaaggcgtagcccgcggtgtgttgacacagaccttaggaccttggcgtcgtcccgtggcctacctctcgaagaaacttgacccagttgcaagtggttggcctgtctgcttgaaagctattgccgcagttgcaatcctcgtcaaagatgccgacaaacttactttgggccagaacattactgttattgcaccacacgcccttgaaaacatcgttcgtcagccacctgatcgctggatgaccaatgctcgcatgacgcattatcagagcctcttgcttaccgaacgcgtgacttttgctccacctgcagccttaaaccccgcaacccttttacccgaagaaacagatgagcctgtgacgcatgactgtcaccagctcttgattgaagaaactggcgtacgcaaagacctcaccgatattccattaacaggtgaggtacttacgtggtttaccgaggggtcctcttatgtcgtcgaaggcaaacgtatggctggtgccgccgttgttgatggcacccgtactatctgggcaagcagcttacccgaaggcacgagtgctcagaaagcagagttgatggccttgacccaagccttacgccttgctgaagggaaatcgatcaatatttacaccgactcacgctatgcattcgccacggcacatgtacacggtgccatctacaaacaacgtggtttgttaacttctgctggccgcgagattaagaacaaagaagaaatcctttccttacttgaagccttacacctccccaaacgtctcgctattattcattgtccagggcatcagaaagcaaaagatcctatcagccgtgggaatcaaatggcagatcgtgtcgctaaacaggcagcccaaggcgttaacttgttgcccatgattgagacccctaaagctcca

SEQ ID NO: 312 - protein, 687 aa, synthetic construct
  REGION 1..687: note = Engineered reverse transcriptase variants
MHHHHHHGGSGVLTLQLDDEYRLYSPLVKPDQNIQFWLEQFPQAWAETGGMGLAKQVPPQVIQLKASATPVSVRQYPLSKEAQEGIRPHVQRLIQQGILVPVQSPWNTPLLPVRKPGTNDYRPVQDLREVNKRVQDIHPTVPNPYNLLCALPPQRSWYTVLDLKDAFFCLRLHPTSQPLFAFEWRDPDTGRTGQLTWTRLPQGFKNSPTIFDEALHRDLANFRIQHPQVTLLQYVDDLLLAGATKQDCLEGTKALLLELSDLGYRVSAKKAQICRREVTYLGYSLRDGQRWLTEARKKTVVQGPAPKTAKQMREFLGTAGFCRLWIPGFATLAAPLYPLTKEKGEFSWAPEHQKAFDAIKKALLSAPALALPDVTKPFTLYVDERKGVARGVLTQTLGPWRRPVAYLSKKLDPVASGWPVCLKAIAAVAILVKDADKLTLGQNITVIAPHALENIVRQPPDRWMTNARMTHYQSLLLTERVTFAPPAALNPATLLPEETDEPVTHDCHQLLIEETGVRKDLTDIPLTGEVLTWFTEGSSYVVEGKRMAGAAVVDGTRTIWASSLPEGTSAQKAELMALTQALRLAEGKSINIYTDSRYAFATAHVHGAIYKQRGLLTSAGREIKNKEEILSLLEALHLPKRLAIIHCPGHQKAKDPISRGNQMADRVAKQAAQGVNLLPMIETPKAP

SEQ ID NO: 313 - DNA, 2061 bp, synthetic construct
  misc_feature 1..2061: note = Engineered reverse transcriptase variants
  source 1..2061: mol_type = other DNA
atgcatcaccatcaccatcatggtggtagcggagtgctgacccttcagctggatgatgaatatcgcttgtacagtccgctggtcaaaccagaccaaaacattcagttctggctcgaacagtttccgcaagcgtgggctgaaactggtggcatgggcctggccaaacaggttcctcctcaggtaatccaattaaaggcatctgccacgccggtgtcagttcgtcagtatccgctgtcgaaagaagcgcaagaggggattcgcccacacgtgcagcgtttgatccagcagggcattctggtaccggttcaaagcccctggaataccccgcttttaccagtccgcaaaccgggtacaaacgattaccgtcctgtgcaagacctgcgcgaagtcaataaacgtgtgcaggatatccacccaaccgttccgaacccgtataatctgttgtgcgcgttaccgccgcagcgttcctggtacacggtgctggacctgaaggacgcgttcttctgtcttcgcctccatcccaccagccagccactgtttgcctttgaatggcgcgatcctgatacgggccgtactgggcaattaacatggacccgtttgccgcagggctttaagaacagtcccacgatctttgatgaggcgcttcaccgcgacctcgcaaatttccgcatccaacacccacaggtaacgttactccagtatgtcgatgatcttttgttagcgggtgccaccaaacaggactgcttggaaggaacgaaagcacttctcttggaactctcggatttaggttatcgtgtgtccgccaagaaagctcagatttgtcgccgcgaagtgacatacttaggctattcattgcgtgatggtcaacgttggcttactgaggcgcgcaagaagaccgttgttcaaatccccgcccctaagaccactaaacagatgcgtgaatttcttggcacggcaggtttctgccgtttgtggattcctggctttgctacgttagcggcacccctctatccactcacgaaagagaaaggagaattctcttgggccccagaacatcagaaagcgtttgacgccatcaagaaagcgttattaagcgctcctgctcttgcattgcccgatgtcaccaaaccattcacgctctacgtggatgaacgcaaaggcgtagcccgcggtgtgttgacacagaccttaggaccttggcgtcgtcccgtggcctacctctcgaagaaacttgacccagttgcaagtggttggcctgtctgcttgaaagctattgccgcagttgcaatcctcgtcaaagatgccgacaaacttactttgggccagaacattactgttattgcaccacacgcccttgaaaacatcgttcgtcagccacctgatcgctggatgaccaatgctcgcatgacgcattatcagagcctcttgcttaccgaacgcgtgacttttgctccacctgcagccttaaaccccgcaacccttttacccgaagaaacagatgagcctgtgacgcatgactgtcaccagctcttgattgaagaaactggcgtacgcaaagacctcaccgatattccattaacaggtgaggtacttacgtggtttaccgaggggtcctcttatgtcgtcgaaggcaaacgtatggctggtgccgccgttgttgatggcacccgtactatctgggcaagcagcttacccgaaggcacgagtgctcagaaagcagagttgatggccttgacccaagccttacgccttgctgaagggaaatcgatcaatatttacaccgactcacgctatgcattcgccacggcacatgtacacggtgccatctacaaacaacgtggtttgttaacttctgctggccgcgagattaagaacaaagaagaaatcctttccttacttgaagccttacacctccccaaacgtctcgctattattcattgtccagggcatcagaaagcaaaagatcctatcagccgtgggaatcaaatggcagatcgtgtcgctaaacaggcagcccaaggcgttaacttgttgcccatgattgagacccctaaagctcca

SEQ ID NO: 314 - protein, 687 aa, synthetic construct
  REGION 1..687: note = Engineered reverse transcriptase variants
MHHHHHHGGSGVLTLQLDDEYRLYSPLVKPDQNIQFWLEQFPQAWAETGGMGLAKQVPPQVIQLKASATPVSVRQYPLSKEAQEGIRPHVQRLIQQGILVPVQSPWNTPLLPVRKPGTNDYRPVQDLREVNKRVQDIHPTVPNPYNLLCALPPQRSWYTVLDLKDAFFCLRLHPTSQPLFAFEWRDPDTGRTGQLTWTRLPQGFKNSPTIFDEALHRDLANFRIQHPQVTLLQYVDDLLLAGATKQDCLEGTKALLLELSDLGYRVSAKKAQICRREVTYLGYSLRDGQRWLTEARKKTVVQIPAPKTTKQMREFLGTAGFCRLWIPGFATLAAPLYPLTKEKGEFSWAPEHQKAFDAIKKALLSAPALALPDVTKPFTLYVDERKGVARGVLTQTLGPWRRPVAYLSKKLDPVASGWPVCLKAIAAVAILVKDADKLTLGQNITVIAPHALENIVRQPPDRWMTNARMTHYQSLLLTERVTFAPPAALNPATLLPEETDEPVTHDCHQLLIEETGVRKDLTDIPLTGEVLTWFTEGSSYVVEGKRMAGAAVVDGTRTIWASSLPEGTSAQKAELMALTQALRLAEGKSINIYTDSRYAFATAHVHGAIYKQRGLLTSAGREIKNKEEILSLLEALHLPKRLAIIHCPGHQKAKDPISRGNQMADRVAKQAAQGVNLLPMIETPKAP

SEQ ID NO: 315 - DNA, 2061 bp, synthetic construct
  misc_feature 1..2061: note = Engineered reverse transcriptase variants
  source 1..2061: mol_type = other DNA
atgcatcaccatcaccatcatggtggtagcggagtgctgacccttcagctggatgatgaatatcgcttgtacagtccgctggtcaaaccagaccaaaacattcagttctggctcgaacagtttccgcaagcgtgggctgaaactggtggcatgggcctggccaaacaggttcctcctcaggtaatccaattaaaggcatctgccacgccggtgtcagttcgtcagtatccggtttcgaaagaagcgcaagaggggattcgcccacacgtgcagcgtttgatccagcagggcattctggtaccggttcaaagcccctggaataccccgcttttaccagtccgcaaaccgggtacaaacgattaccgtcctgtgcaagacctgcgcgaagtcaataaacgtgtgcaggatatccacccaaccgttccgaacccgtataatctgttgtgcgcgttaccgccgcagcgttcctggtacacggtgctggacctgaaggacgcgttcttctgtcttcgcctccatcccaccagccagccactgtttgcctttgaatggcgcgatcctgatacgggccgtactgggcaattaacatggacccgtttgccgcagggctttaagaacagtcccacgatctttgatgaggctcttcaccgcgacctcgcaaatttccgcatccaacacccacaggtaacgttactccagtatgtcgatgatcttttgttagcgggtgccaccaaacaggactgcttggaaggaacgaaagcacttctcttggaactctcggatttaggttatcgtgtgtccgccaagaaagctcagatttgtcgccgcgaagtgacatacttaggctattcattgcgtgatggtcaacgttggcttactgaggcgcgcaagaagaccgttgttcaaatccccgcccctaagaccgcgaaacagatgcgtgaatttcttggcacggcaggtttctgccgtttgtggattcctggctttgctacgttagcggcacccctctatccactcacgaaagagaaaggagaattctcttgggccccagaacatcagaaagcgtttgacgccatcaagaaagcgttattaagcgctcctgctcttgcattgcccgatgtcaccaaaccattcacgctctacgtggatgaacgcaaaggcgtagcccgcggtgtgttgacacagaccttaggaccttggcgtcgtcccgtggcctacctctcgaagaaacttgacccagttgcaagtggttggcctgtctgcttgaaagctattgccgcagttgcaatcctcgtcaaagatgccgacaaacttactttgggccagaacattactgttattgcaccacacgcccttgaaaacatcgttcgtcagccacctgatcgctggatgaccaatgctcgcatgacgcattatcagagcctcttgcttaccgaacgcgtgacttttgctccacctgcagccttaaaccccgcaacccttttacccgaagaaacagatgagcctgtgacgcatgactgtcaccagctcttgattgaagaaactggcgtacgcaaagacctcaccgatattccattaacaggtgaggtacttacgtggtttaccgaggggtcctcttatgtcgtcgaaggcaaacgtatggctggtgccgccgttgttgatggcacccgtactatctgggcaagcagcttacccgaaggcacgagtgctcagaaagcagagttgatggccttgacccaagccttacgccttgctgaagggaaatcgatcaatatttacaccgactcacgctatgcattcgccacggcacatgtacacggtgccatctacaaacaacgtggtttgttaacttctgctggccgcgagattaagaacaaagaagaaatcctttccttacttgaagccttacacctccccaaacgtctcgctattattcattgtccagggcatcagaaagcaaaagatcctatcagccgtgggaatcaaatggcagatcgtgtcgctaaacaggcagcccaaggcgttaacttgttgcccatgattgagacccctaaagctcca

SEQ ID NO: 316 - protein, 687 aa, synthetic construct
  REGION 1..687: note = Engineered reverse transcriptase variants
MHHHHHHGGSGVLTLQLDDEYRLYSPLVKPDQNIQFWLEQFPQAWAETGGMGLAKQVPPQVIQLKASATPVSVRQYPVSKEAQEGIRPHVQRLIQQGILVPVQSPWNTPLLPVRKPGTNDYRPVQDLREVNKRVQDIHPTVPNPYNLLCALPPQRSWYTVLDLKDAFFCLRLHPTSQPLFAFEWRDPDTGRTGQLTWTRLPQGFKNSPTIFDEALHRDLANFRIQHPQVTLLQYVDDLLLAGATKQDCLEGTKALLLELSDLGYRVSAKKAQICRREVTYLGYSLRDGQRWLTEARKKTVVQIPAPKTAKQMREFLGTAGFCRLWIPGFATLAAPLYPLTKEKGEFSWAPEHQKAFDAIKKALLSAPALALPDVTKPFTLYVDERKGVARGVLTQTLGPWRRPVAYLSKKLDPVASGWPVCLKAIAAVAILVKDADKLTLGQNITVIAPHALENIVRQPPDRWMTNARMTHYQSLLLTERVTFAPPAALNPATLLPEETDEPVTHDCHQLLIEETGVRKDLTDIPLTGEVLTWFTEGSSYVVEGKRMAGAAVVDGTRTIWASSLPEGTSAQKAELMALTQALRLAEGKSINIYTDSRYAFATAHVHGAIYKQRGLLTSAGREIKNKEEILSLLEALHLPKRLAIIHCPGHQKAKDPISRGNQMADRVAKQAAQGVNLLPMIETPKAP

SEQ ID NO: 317 - DNA, 2061 bp, synthetic construct
  misc_feature 1..2061: note = Engineered reverse transcriptase variants
  source 1..2061: mol_type = other DNA
atgcatcaccatcaccatcatggtggtagcggagtgctgacccttcagctggatgatgaatatcgcttgtacagtccgctggtcaaaccagaccaaaacattcagttctggctcgaacagtttccgcaagcgtgggctgaaactggtggcatgggcctggccaaacaggttcctcctcaggtaatccaattaaaggcatctgccacgccggtgtcagttcgtcagtatccgctgtcgaaagaagcgcaagaggggattcgcccacacgtgcagcgtttgatccagcagggcattctggtaccggttcaaagcccctggaataccccgcttttaccagggcgcaaaccgggtacaaacgattaccgtcctgtgcaagacctgcgcgaagtcaataaacgtgtgcaggatatccacccaaccgttccgaacccgtataatctgttgtgcgcgttaccgccgcagcgttcctggtacacggtgctggacctgaaggacgcgttcttctgtcttcgcctccatcccaccagccagccactgtttgcctttgaatggcgcgatcctgatacgggccgtactgggcaattaacatggacccgtttgccgcagggctttaagaacagtcccacgatctttgatgaggctcttcaccgcgacctcgcaaatttccgcatccaacacccacaggtaacgttactccagtatgtcgatgatcttttgttagcgggtgccaccaaacaggactgcttggaaggaacgaaagcacttctcttggaactctcggatttaggttatcgtgtgtccgccaagaaagctcagatttgtcgccgcgaagtgacatacttaggctattcattgcgtgatggtcaacgttggcttactgaggcgcgcaagaagaccgttgttcaaatccccgcccctaagaccgcgaaacagatgcgtgaatttcttggcacggcaggtttctgccgtttgtggattcctggctttgctacgttagcggcacccctctatccactcacgaaagagaaaggagaattctcttgggccccagaacatcagaaagcgtttgacgccatcaagaaagcgttattaagcgctcctgctcttgcattgcccgatgtcaccaaaccattcacgctctacgtggatgaacgcaaaggcgtagcccgcggtgtgttgacacagaccttaggaccttggcgtcgtcccgtggcctacctctcgaagaaacttgacccagttgcaagtggttggcctgtctgcttgaaagctattgccgcagttgcaatcctcgtcaaagatgccgacaaacttactttgggccagaacattactgttattgcaccacacgcccttgaaaacatcgttcgtcagccacctgatcgctggatgaccaatgctcgcatgacgcattatcagagcctcttgcttaccgaacgcgtgacttttgctccacctgcagccttaaaccccgcaacccttttacccgaagaaacagatgagcctgtgacgcatgactgtcaccagctcttgattgaagaaactggcgtacgcaaagacctcaccgatattccattaacaggtgaggtacttacgtggtttaccgaggggtcctcttatgtcgtcgaaggcaaacgtatggctggtgccgccgttgttgatggcacccgtactatctgggcaagcagcttacccgaaggcacgagtgctcagaaagcagagttgatggccttgacccaagccttacgccttgctgaagggaaatcgatcaatatttacaccgactcacgctatgcattcgccacggcacatgtacacggtgccatctacaaacaacgtggtttgttaacttctgctggccgcgagattaagaacaaagaagaaatcctttccttacttgaagccttacacctccccaaacgtctcgctattattcattgtccagggcatcagaaagcaaaagatcctatcagccgtgggaatcaaatggcagatcgtgtcgctaaacaggcagcccaaggcgttaacttgttgcccatgattgagacccctaaagctcca

SEQ ID NO: 318 - protein, 687 aa, synthetic construct
  REGION 1..687: note = Engineered reverse transcriptase variants
MHHHHHHGGSGVLTLQLDDEYRLYSPLVKPDQNIQFWLEQFPQAWAETGGMGLAKQVPPQVIQLKASATPVSVRQYPLSKEAQEGIRPHVQRLIQQGILVPVQSPWNTPLLPGRKPGTNDYRPVQDLREVNKRVQDIHPTVPNPYNLLCALPPQRSWYTVLDLKDAFFCLRLHPTSQPLFAFEWRDPDTGRTGQLTWTRLPQGFKNSPTIFDEALHRDLANFRIQHPQVTLLQYVDDLLLAGATKQDCLEGTKALLLELSDLGYRVSAKKAQICRREVTYLGYSLRDGQRWLTEARKKTVVQIPAPKTAKQMREFLGTAGFCRLWIPGFATLAAPLYPLTKEKGEFSWAPEHQKAFDAIKKALLSAPALALPDVTKPFTLYVDERKGVARGVLTQTLGPWRRPVAYLSKKLDPVASGWPVCLKAIAAVAILVKDADKLTLGQNITVIAPHALENIVRQPPDRWMTNARMTHYQSLLLTERVTFAPPAALNPATLLPEETDEPVTHDCHQLLIEETGVRKDLTDIPLTGEVLTWFTEGSSYVVEGKRMAGAAVVDGTRTIWASSLPEGTSAQKAELMALTQALRLAEGKSINIYTDSRYAFATAHVHGAIYKQRGLLTSAGREIKNKEEILSLLEALHLPKRLAIIHCPGHQKAKDPISRGNQMADRVAKQAAQGVNLLPMIETPKAP

SEQ ID NO: 319 - DNA, 2061 bp, synthetic construct
  misc_feature 1..2061: note = Engineered reverse transcriptase variants
  source 1..2061: mol_type = other DNA
atgcatcaccatcaccatcatggtggtagcggagtgctgacccttcagctggatgatgaatatcgcttgtacagtccgctggtcaaaccagaccaaaacattcagttctggctcgaacagtttccgcaagcgtgggctgaaactggtggcatgggcctggccaaacaggttcctcctcaggtaatccaattaaaggcatctgccacgccggtgtcagttcgtcagtatccgctgtcgaaagaagcgcaagaggggattcgcccacacgtgcagcgtttgatccagcagggcattctggtaccggttcaaagcccctggaataccccgcttttaccagtccgcaaaccgggtacaaacgattaccgtcctgtgcaagacctgcgcgaagtcaattttcgtgtgcaggatatccacccaaccgttccgaacccgtataatctgttgtgcgcgttaccgccgcagcgttcctggtacacggtgctggacctgaaggacgcgttcttctgtcttcgcctccatcccaccagccagccactgtttgcctttgaatggcgcgatcctgatacgggccgtactgggcaattaacatggacccgtttgccgcagggctttaagaacagtcccacgatctttgatgaggctcttcaccgcgacctcgcaaatttccgcatccaacacccacaggtaacgttactccagtatgtcgatgatcttttgttagcgggtgccaccaaacaggactgcttggaaggaacgaaagcacttctcttggaactctcggatttaggttatcgtgtgtccgccaagaaagctcagatttgtcgccgcgaagtgacatacttaggctattcattgcgtgatggtcaacgttggcttactgaggcgcgcaagaagaccgttgttcaaatccccgcccctaagaccgcgaaacagatgcgtgaatttcttggcacggcaggtttctgccgtttgtggattcctggctttgctacgttagcggcacccctctatccactcacgaaagagaaaggagaattctcttgggccccagaacatcagaaagcgtttgacgccatcaagaaagcgttattaagcgctcctgctcttgcattgcccgatgtcaccaaaccattcacgctctacgtggatgaacgcaaaggcgtagcccgcggtgtgttgacacagaccttaggaccttggcgtcgtcccgtggcctacctctcgaagaaacttgacccagttgcaagtggttggcctgtctgcttgaaagctattgccgcagttgcaatcctcgtcaaagatgccgacaaacttactttgggccagaacattactgttattgcaccacacgcccttgaaaacatcgttcgtcagccacctgatcgctggatgaccaatgctcgcatgacgcattatcagagcctcttgcttaccgaacgcgtgacttttgctccacctgcagccttaaaccccgcaacccttttacccgaagaaacagatgagcctgtgacgcatgactgtcaccagctcttgattgaagaaactggcgtacgcaaagacctcaccgatattccattaacaggtgaggtacttacgtggtttaccgaggggtcctcttatgtcgtcgaaggcaaacgtatggctggtgccgccgttgttgatggcacccgtactatctgggcaagcagcttacccgaaggcacgagtgctcagaaagcagagttgatggccttgacccaagccttacgccttgctgaagggaaatcgatcaatatttacaccgactcacgctatgcattcgccacggcacatgtacacggtgccatctacaaacaacgtggtttgttaacttctgctggccgcgagattaagaacaaagaagaaatcctttccttacttgaagccttacacctccccaaacgtctcgctattattcattgtccagggcatcagaaagcaaaagatcctatcagccgtgggaatcaaatggcagatcgtgtcgctaaacaggcagcccaaggcgttaacttgttgcccatgattgagacccctaaagctcca

SEQ ID NO: 320 - protein, 687 aa, synthetic construct
  REGION 1..687: note = Engineered reverse transcriptase variants
MHHHHHHGGSGVLTLQLDDEYRLYSPLVKPDQNIQFWLEQFPQAWAETGGMGLAKQVPPQVIQLKASATPVSVRQYPLSKEAQEGIRPHVQRLIQQGILVPVQSPWNTPLLPVRKPGTNDYRPVQDLREVNFRVQDIHPTVPNPYNLLCALPPQRSWYTVLDLKDAFFCLRLHPTSQPLFAFEWRDPDTGRTGQLTWTRLPQGFKNSPTIFDEALHRDLANFRIQHPQVTLLQYVDDLLLAGATKQDCLEGTKALLLELSDLGYRVSAKKAQICRREVTYLGYSLRDGQRWLTEARKKTVVQIPAPKTAKQMREFLGTAGFCRLWIPGFATLAAPLYPLTKEKGEFSWAPEHQKAFDAIKKALLSAPALALPDVTKPFTLYVDERKGVARGVLTQTLGPWRRPVAYLSKKLDPVASGWPVCLKAIAAVAILVKDADKLTLGQNITVIAPHALENIVRQPPDRWMTNARMTHYQSLLLTERVTFAPPAALNPATLLPEETDEPVTHDCHQLLIEETGVRKDLTDIPLTGEVLTWFTEGSSYVVEGKRMAGAAVVDGTRTIWASSLPEGTSAQKAELMALTQALRLAEGKSINIYTDSRYAFATAHVHGAIYKQRGLLTSAGREIKNKEEILSLLEALHLPKRLAIIHCPGHQKAKDPISRGNQMADRVAKQAAQGVNLLPMIETPKAP

SEQ ID NO: 321 - DNA, 2061 bp, synthetic construct
  misc_feature 1..2061: note = Engineered reverse transcriptase variants
  source 1..2061: mol_type = other DNA
atgcatcaccatcaccatcatggtggtagcggagtgctgacccttcagctggatgatgaatatcgcttgtacagtccgctggtcaaaccagaccaaaacattcagttctggctcgaacagtttccgcaagcgtgggctgaaactggtggcatgggcctggccaaacaggttcctcctcaggtaatccaattaaaggcatctgccacgccggtgtcagttcgtcagtatccgctgtcgaaagaagcgcaagaggggattcgcccacacgtgcagcgtttgatccagcagggcattctggtaccggttcaaagcccctggaataccccgcttttaccagtccgcaaaccgggtacaaacgattaccgtcctgtgcaagacctgcgcgaagtcaataaacgtgtgcaggatatccacccaaccgttccgaacccgtataatctgttgtgcgcgttaccgccgcagcgttcctggtacacggtgctggacctgaaggacgcgttcttctgtcttcgcctccatcccaccagccagccactgtttgcctttgaatggcgcgatcctgatacgggccgtactgggcaattaacatggacccgtttgccgcagggctttaagaacagtcccacgatctttgatgaggctcttcaccgcgacctcgcaaatttccgcatccaacacccacaggtaacgttactccagtatgtcgatgatcttttgttagcgggtgccaccaaacaggactgcttggaaggaacgaaagcacttctcttggaactctcggatttaggttatcgtgtgtccgccaagaaagctcagatttgtcgccgcgaagtgacatacttaggctattcattgcgtgatggtcaacgttggcttactgaggcgcgcaagaagaccgttgttcaaatccccgcccctaagaccgcgaaaattatgcgtgaatttcttggcacggcaggtttctgccgtttgtggattcctggctttgctacgttagcggcacccctctatccactcacgaaagagaaaggagaattctcttgggccccagaacatcagaaagcgtttgacgccatcaagaaagcgttattaagcgctcctgctcttgcattgcccgatgtcaccaaaccattcacgctctacgtggatgaacgcaaaggcgtagcccgcggtgtgttgacacagaccttaggaccttggcgtcgtcccgtggcctacctctcgaagaaacttgacccagttgcaagtggttggcctgtctgcttgaaagctattgccgcagttgcaatcctcgtcaaagatgccgacaaacttactttgggccagaacattactgttattgcaccacacgcccttgaaaacatcgttcgtcagccacctgatcgctggatgaccaatgctcgcatgacgcattatcagagcctcttgcttaccgaacgcgtgacttttgctccacctgcagccttaaaccccgcaacccttttacccgaagaaacagatgagcctgtgacgcatgactgtcaccagctcttgattgaagaaactggcgtacgcaaagacctcaccgatattccattaacaggtgaggtacttacgtggtttaccgaggggtcctcttatgtcgtcgaaggcaaacgtatggctggtgccgccgttgttgatggcacccgtactatctgggcaagcagcttacccgaaggcacgagtgctcagaaagcagagttgatggccttgacccaagccttacgccttgctgaagggaaatcgatcaatatttacaccgactcacgctatgcattcgccacggcacatgtacacggtgccatctacaaacaacgtggtttgttaacttctgctggccgcgagattaagaacaaagaagaaatcctttccttacttgaagccttacacctccccaaacgtctcgctattattcattgtccagggcatcagaaagcaaaagatcctatcagccgtgggaatcaaatggcagatcgtgtcgctaaacaggcagcccaaggcgttaacttgttgcccatgattgagacccctaaagctcca

SEQ ID NO: 322 - protein, 687 aa, synthetic construct
  REGION 1..687: note = Engineered reverse transcriptase variants
MHHHHHHGGSGVLTLQLDDEYRLYSPLVKPDQNIQFWLEQFPQAWAETGGMGLAKQVPPQVIQLKASATPVSVRQYPLSKEAQEGIRPHVQRLIQQGILVPVQSPWNTPLLPVRKPGTNDYRPVQDLREVNKRVQDIHPTVPNPYNLLCALPPQRSWYTVLDLKDAFFCLRLHPTSQPLFAFEWRDPDTGRTGQLTWTRLPQGFKNSPTIFDEALHRDLANFRIQHPQVTLLQYVDDLLLAGATKQDCLEGTKALLLELSDLGYRVSAKKAQICRREVTYLGYSLRDGQRWLTEARKKTVVQIPAPKTAKIMREFLGTAGFCRLWIPGFATLAAPLYPLTKEKGEFSWAPEHQKAFDAIKKALLSAPALALPDVTKPFTLYVDERKGVARGVLTQTLGPWRRPVAYLSKKLDPVASGWPVCLKAIAAVAILVKDADKLTLGQNITVIAPHALENIVRQPPDRWMTNARMTHYQSLLLTERVTFAPPAALNPATLLPEETDEPVTHDCHQLLIEETGVRKDLTDIPLTGEVLTWFTEGSSYVVEGKRMAGAAVVDGTRTIWASSLPEGTSAQKAELMALTQALRLAEGKSINIYTDSRYAFATAHVHGAIYKQRGLLTSAGREIKNKEEILSLLEALHLPKRLAIIHCPGHQKAKDPISRGNQMADRVAKQAAQGVNLLPMIETPKAP

SEQ ID NO: 323 - DNA, 2061 bp, synthetic construct
  misc_feature 1..2061: note = Engineered reverse transcriptase variants
  source 1..2061: mol_type = other DNA
atgcatcaccatcaccatcatggtggtagcggagtgctgacccttcagctggatgatgaatatcgcttgtacagtccgctggtcaaaccagaccaaaacattcagttctggctcgaacagtttccgcaagcgtgggctgaaactggtggcatgggcctggccaaacaggttcctcctcaggtaatccaattaaaggcatctgccacgccggtgtcagttcgtcagtatccgctgtcgaaagaagcgcaagaggggattcgcccacacgtgcagcgtttgatccagcagggcattctggtaccggttcaaagcccctggaataccccgcttttaccagtccgcaaaccgggtacatatgattaccgtcctgtgcaagacctgcgcgaagtcaataaacgtgtgcaggatatccacccaaccgttccgaacccgtataatctgttgtgcgcgttaccgccgcagcgttcctggtacacggtgctggacctgaaggacgcgttcttctgtcttcgcctccatcccaccagccagccactgtttgcctttgaatggcgcgatcctgatacgggccgtactgggcaattaacatggacccgtttgccgcagggctttaagaacagtcccacgatctttgatgaggctcttcaccgcgacctcgcaaatttccgcatccaacacccacaggtaacgttactccagtatgtcgatgatcttttgttagcgggtgccaccaaacaggactgcttggaaggaacgaaagcacttctcttggaactctcggatttaggttatcgtgtgtccgccaagaaagctcagatttgtcgccgcgaagtgacatacttaggctattcattgcgtgatggtcaacgttggcttactgaggcgcgcaagaagaccgttgttcaaatccccgcccctaagaccgcgaaacagatgcgtgaatttcttggcacggcaggtttctgccgtttgtggattcctggctttgctacgttagcggcacccctctatccactcacgaaagagaaaggagaattctcttgggccccagaacatcagaaagcgtttgacgccatcaagaaagcgttattaagcgctcctgctcttgcattgcccgatgtcaccaaaccattcacgctctacgtggatgaacgcaaaggcgtagcccgcggtgtgttgacacagaccttaggaccttggcgtcgtcccgtggcctacctctcgaagaaacttgacccagttgcaagtggttggcctgtctgcttgaaagctattgccgcagttgcaatcctcgtcaaagatgccgacaaacttactttgggccagaacattactgttattgcaccacacgcccttgaaaacatcgttcgtcagccacctgatcgctggatgaccaatgctcgcatgacgcattatcagagcctcttgcttaccgaacgcgtgacttttgctccacctgcagccttaaaccccgcaacccttttacccgaagaaacagatgagcctgtgacgcatgactgtcaccagctcttgattgaagaaactggcgtacgcaaagacctcaccgatattccattaacaggtgaggtacttacgtggtttaccgaggggtcctcttatgtcgtcgaaggcaaacgtatggctggtgccgccgttgttgatggcacccgtactatctgggcaagcagcttacccgaaggcacgagtgctcagaaagcagagttgatggccttgacccaagccttacgccttgctgaagggaaatcgatcaatatttacaccgactcacgctatgcattcgccacggcacatgtacacggtgccatctacaaacaacgtggtttgttaacttctgctggccgcgagattaagaacaaagaagaaatcctttccttacttgaagccttacacctccccaaacgtctcgctattattcattgtccagggcatcagaaagcaaaagatcctatcagccgtgggaatcaaatggcagatcgtgtcgctaaacaggcagcccaaggcgttaacttgttgcccatgattgagacccctaaagctcca

SEQ ID NO: 324 - protein, 687 aa, synthetic construct
  REGION 1..687: note = Engineered reverse transcriptase variants
MHHHHHHGGSGVLTLQLDDEYRLYSPLVKPDQNIQFWLEQFPQAWAETGGMGLAKQVPPQVIQLKASATPVSVRQYPLSKEAQEGIRPHVQRLIQQGILVPVQSPWNTPLLPVRKPGTYDYRPVQDLREVNKRVQDIHPTVPNPYNLLCALPPQRSWYTVLDLKDAFFCLRLHPTSQPLFAFEWRDPDTGRTGQLTWTRLPQGFKNSPTIFDEALHRDLANFRIQHPQVTLLQYVDDLLLAGATKQDCLEGTKALLLELSDLGYRVSAKKAQICRREVTYLGYSLRDGQRWLTEARKKTVVQIPAPKTAKQMREFLGTAGFCRLWIPGFATLAAPLYPLTKEKGEFSWAPEHQKAFDAIKKALLSAPALALPDVTKPFTLYVDERKGVARGVLTQTLGPWRRPVAYLSKKLDPVASGWPVCLKAIAAVAILVKDADKLTLGQNITVIAPHALENIVRQPPDRWMTNARMTHYQSLLLTERVTFAPPAALNPATLLPEETDEPVTHDCHQLLIEETGVRKDLTDIPLTGEVLTWFTEGSSYVVEGKRMAGAAVVDGTRTIWASSLPEGTSAQKAELMALTQALRLAEGKSINIYTDSRYAFATAHVHGAIYKQRGLLTSAGREIKNKEEILSLLEALHLPKRLAIIHCPGHQKAKDPISRGNQMADRVAKQAAQGVNLLPMIETPKAP

SEQ ID NO: 325 - DNA, 2061 bp, synthetic construct
  misc_feature 1..2061: note = Engineered reverse transcriptase variants
  source 1..2061: mol_type = other DNA
atgcatcaccatcaccatcatggtggtagcggagtgctgacccttcagctggatgatgaatatcgcttgtacagtccgctggtcaaaccagaccaaaacattcagttctggctcgaacagtttccgcaagcgtgggctgaaactggtggcatgggcctggccaaacaggttcctcctcaggtaatccaattaaaggcatctgccacgccggtgtcagttcgtcagtatccgctgtcgaaagaagcggaggaggggattcgcccacacgtgcagcgtttgatccagcagggcattctggtaccggttcaaagcccctggaataccccgcttttaccagtccgcaaaccgggtacaaacgattaccgtcctgtgcaagacctgcgcgaagtcaataaacgtgtgcaggatatccacccaaccgttccgaacccgtataatctgttgtgcgcgttaccgccgcagcgttcctggtacacggtgctggacctgaaggacgcgttcttctgtcttcgcctccatcccaccagccagccactgtttgcctttgaatggcgcgatcctgatacgggccgtactgggcaattaacatggacccgtttgccgcagggctttaagaacagtcccacgatctttgatgaggctcttcaccgcgacctcgcaaatttccgcatccaacacccacaggtaacgttactccagtatgtcgatgatcttttgttagcgggtgccaccaaacaggactgcttggaaggaacgaaagcacttctcttggaactctcggatttaggttatcgtgtgtccgccaagaaagctcagatttgtcgccgcgaagtgacatacttaggctattcattgcgtgatggtcaacgttggcttactgaggcgcgcaagaagaccgttgttcaaatccccgcccctaagaccgcgaaacagatgcgtgaatttcttggcacggcaggtttctgccgtttgtggattcctggctttgctacgttagcggcacccctctatccactcacgaaagagaaaggagaattctcttgggccccagaacatcagaaagcgtttgacgccatcaagaaagcgttattaagcgctcctgctcttgcattgcccgatgtcaccaaaccattcacgctctacgtggatgaacgcaaaggcgtagcccgcggtgtgttgacacagaccttaggaccttggcgtcgtcccgtggcctacctctcgaagaaacttgacccagttgcaagtggttggcctgtctgcttgaaagctattgccgcagttgcaatcctcgtcaaagatgccgacaaacttactttgggccagaacattactgttattgcaccacacgcccttgaaaacatcgttcgtcagccacctgatcgctggatgaccaatgctcgcatgacgcattatcagagcctcttgcttaccgaacgcgtgacttttgctccacctgcagccttaaaccccgcaacccttttacccgaagaaacagatgagcctgtgacgcatgactgtcaccagctcttgattgaagaaactggcgtacgcaaagacctcaccgatattccattaacaggtgaggtacttacgtggtttaccgaggggtcctcttatgtcgtcgaaggcaaacgtatggctggtgccgccgttgttgatggcacccgtactatctgggcaagcagcttacccgaaggcacgagtgctcagaaagcagagttgatggccttgacccaagccttacgccttgctgaagggaaatcgatcaatatttacaccgactcacgctatgcattcgccacggcacatgtacacggtgccatctacaaacaacgtggtttgttaacttctgctggccgcgagattaagaacaaagaagaaatcctttccttacttgaagccttacacctccccaaacgtctcgctattattcattgtccagggcatcagaaagcaaaagatcctatcagccgtgggaatcaaatggcagatcgtgtcgctaaacaggcagcccaaggcgttaacttgttgcccatgattgagacccctaaagctcca

SEQ ID NO: 326 - protein, 687 aa, synthetic construct
  REGION 1..687: note = Engineered reverse transcriptase variants
MHHHHHHGGSGVLTLQLDDEYRLYSPLVKPDQNIQFWLEQFPQAWAETGGMGLAKQVPPQVIQLKASATPVSVRQYPLSKEAEEGIRPHVQRLIQQGILVPVQSPWNTPLLPVRKPGTNDYRPVQDLREVNKRVQDIHPTVPNPYNLLCALPPQRSWYTVLDLKDAFFCLRLHPTSQPLFAFEWRDPDTGRTGQLTWTRLPQGFKNSPTIFDEALHRDLANFRIQHPQVTLLQYVDDLLLAGATKQDCLEGTKALLLELSDLGYRVSAKKAQICRREVTYLGYSLRDGQRWLTEARKKTVVQIPAPKTAKQMREFLGTAGFCRLWIPGFATLAAPLYPLTKEKGEFSWAPEHQKAFDAIKKALLSAPALALPDVTKPFTLYVDERKGVARGVLTQTLGPWRRPVAYLSKKLDPVASGWPVCLKAIAAVAILVKDADKLTLGQNITVIAPHALENIVRQPPDRWMTNARMTHYQSLLLTERVTFAPPAALNPATLLPEETDEPVTHDCHQLLIEETGVRKDLTDIPLTGEVLTWFTEGSSYVVEGKRMAGAAVVDGTRTIWASSLPEGTSAQKAELMALTQALRLAEGKSINIYTDSRYAFATAHVHGAIYKQRGLLTSAGREIKNKEEILSLLEALHLPKRLAIIHCPGHQKAKDPISRGNQMADRVAKQAAQGVNLLPMIETPKAP

SEQ ID NO: 327 - DNA, 2061 bp, synthetic construct
  misc_feature 1..2061: note = Engineered reverse transcriptase variants
  source 1..2061: mol_type = other DNA
atgcatcaccatcaccatcatggtggtagcggagtgctgacccttcagctggatgatgaatatcgcttgtacagtccgctggtcaaaccagaccaaaacattcagttctggctcgaacagtttccgcaagcgtgggctgaaactggtggcatgggcctggccaaacaggttcctcctcaggtaatccaattaaaggcatctgccacgccggtgtcagttcgtcagtatccgctgtcgaaagaagcgcaagaggggattcgcccacacgtgcagcgtttgatccagcagggcagtctggtaccggttcaaagcccctggaataccccgcttttaccagtccgcaaaccgggtacaaacgattaccgtcctgtgcaagacctgcgcgaagtcaataaacgtgtgcaggatatccacccaaccgttccgaacccgtataatctgttgtgcgcgttaccgccgcagcgttcctggtacacggtgctggacctgaaggacgcgttcttctgtcttcgcctccatcccaccagccagccactgtttgcctttgaatggcgcgatcctgatacgggccgtactgggcaattaacatggacccgtttgccgcagggctttaagaacagtcccacgatctttgatgaggctcttcaccgcgacctcgcaaatttccgcatccaacacccacaggtaacgttactccagtatgtcgatgatcttttgttagcgggtgccaccaaacaggactgcttggaaggaacgaaagcacttctcttggaactctcggatttaggttatcgtgtgtccgccaagaaagctcagatttgtcgccgcgaagtgacatacttaggctattcattgcgtgatggtcaacgttggcttactgaggcgcgcaagaagaccgttgttcaaatccccgcccctaagaccgcgaaacagatgcgtgaatttcttggcacggcaggtttctgccgtttgtggattcctggctttgctacgttagcggcacccctctatccactcacgaaagagaaaggagaattctcttgggccccagaacatcagaaagcgtttgacgccatcaagaaagcgttattaagcgctcctgctcttgcattgcccgatgtcaccaaaccattcacgctctacgtggatgaacgcaaaggcgtagcccgcggtgtgttgacacagaccttaggaccttggcgtcgtcccgtggcctacctctcgaagaaacttgacccagttgcaagtggttggcctgtctgcttgaaagctattgccgcagttgcaatcctcgtcaaagatgccgacaaacttactttgggccagaacattactgttattgcaccacacgcccttgaaaacatcgttcgtcagccacctgatcgctggatgaccaatgctcgcatgacgcattatcagagcctcttgcttaccgaacgcgtgacttttgctccacctgcagccttaaaccccgcaacccttttacccgaagaaacagatgagcctgtgacgcatgactgtcaccagctcttgattgaagaaactggcgtacgcaaagacctcaccgatattccattaacaggtgaggtacttacgtggtttaccgaggggtcctcttatgtcgtcgaaggcaaacgtatggctggtgccgccgttgttgatggcacccgtactatctgggcaagcagcttacccgaaggcacgagtgctcagaaagcagagttgatggccttgacccaagccttacgccttgctgaagggaaatcgatcaatatttacaccgactcacgctatgcattcgccacggcacatgtacacggtgccatctacaaacaacgtggtttgttaacttctgctggccgcgagattaagaacaaagaagaaatcctttccttacttgaagccttacacctccccaaacgtctcgctattattcattgtccagggcatcagaaagcaaaagatcctatcagccgtgggaatcaaatggcagatcgtgtcgctaaacaggcagcccaaggcgttaacttgttgcccatgattgagacccctaaagctcca

SEQ ID NO: 328 - protein, 687 aa, synthetic construct
  REGION 1..687: note = Engineered reverse transcriptase variants
MHHHHHHGGSGVLTLQLDDEYRLYSPLVKPDQNIQFWLEQFPQAWAETGGMGLAKQVPPQVIQLKASATPVSVRQYPLSKEAQEGIRPHVQRLIQQGSLVPVQSPWNTPLLPVRKPGTNDYRPVQDLREVNKRVQDIHPTVPNPYNLLCALPPQRSWYTVLDLKDAFFCLRLHPTSQPLFAFEWRDPDTGRTGQLTWTRLPQGFKNSPTIFDEALHRDLANFRIQHPQVTLLQYVDDLLLAGATKQDCLEGTKALLLELSDLGYRVSAKKAQICRREVTYLGYSLRDGQRWLTEARKKTVVQIPAPKTAKQMREFLGTAGFCRLWIPGFATLAAPLYPLTKEKGEFSWAPEHQKAFDAIKKALLSAPALALPDVTKPFTLYVDERKGVARGVLTQTLGPWRRPVAYLSKKLDPVASGWPVCLKAIAAVAILVKDADKLTLGQNITVIAPHALENIVRQPPDRWMTNARMTHYQSLLLTERVTFAPPAALNPATLLPEETDEPVTHDCHQLLIEETGVRKDLTDIPLTGEVLTWFTEGSSYVVEGKRMAGAAVVDGTRTIWASSLPEGTSAQKAELMALTQALRLAEGKSINIYTDSRYAFATAHVHGAIYKQRGLLTSAGREIKNKEEILSLLEALHLPKRLAIIHCPGHQKAKDPISRGNQMADRVAKQAAQGVNLLPMIETPKAP

SEQ ID NO: 329 - DNA, 2061 bp, synthetic construct
  misc_feature 1..2061: note = Engineered reverse transcriptase variants
  source 1..2061: mol_type = other DNA
atgcatcaccatcaccatcatggtggtagcggagtgctgacccttcagctggatgatgaatatcgcttgtacagtccgctggtcaaaccagaccaaaacattcagttctggctcgaacagtttccgcaagcgtgggctgaaactggtggcatgggcctggccaaacaggttcctcctcaggtaatccaattaaaggcatctgccacgccggtgtcagttcgtcagtatccgctgtcgaaagaagcgcaagaggggattcgcccacacgtgcagcgtttgatccagcagggcattctggtaccggttcaaagcccctggaataccccgcttttaccagtccgcaaaccgggtacaaacgattaccgtcctgtgcaagacctgcgcgaagtcaataaacgtgtgcaggatatccacccaaccgttccgaacccgtataatctgttgtgcgcgttaccgccgcagcgttcctggtacacggtgctggacctgaaggacgcgttcttctgtcttcgcctccatcccaccagccagccactgtttgcctttgaatggcgcgatcctgatacgggccgtactgggcaattaacatggacccgtttgccgcagggctttaagaacagtcccacgatctttgatgaggctcttcaccgcgacctcgcaaatttccgcatccaacacccacaggtaacgttactccagtatgtcgatgatcttttgttagcgggtgccaccaaacaggactgcttggaaggaacgaaagcacttctcttggaactctcggatttaggttatcgtgtgtccgccaagaaagctcagatttgtcgccgcgaagtgacatacttaggctattcattgcgtgatggtcaacgttggcttactgaggcgcgcaagaagaccgttgttcaaatccccgcccctaagaccgcgaaacagatgcgtatgtttcttggcacggcaggtttctgccgtttgtggattcctggctttgctacgttagcggcacccctctatccactcacgaaagagaaaggagaattctcttgggccccagaacatcagaaagcgtttgacgccatcaagaaagcgttattaagcgctcctgctcttgcattgcccgatgtcaccaaaccattcacgctctacgtggatgaacgcaaaggcgtagcccgcggtgtgttgacacagaccttaggaccttggcgtcgtcccgtggcctacctctcgaagaaacttgacccagttgcaagtggttggcctgtctgcttgaaagctattgccgcagttgcaatcctcgtcaaagatgccgacaaacttactttgggccagaacattactgttattgcaccacacgcccttgaaaacatcgttcgtcagccacctgatcgctggatgaccaatgctcgcatgacgcattatcagagcctcttgcttaccgaacgcgtgacttttgctccacctgcagccttaaaccccgcaacccttttacccgaagaaacagatgagcctgtgacgcatgactgtcaccagctcttgattgaagaaactggcgtacgcaaagacctcaccgatattccattaacaggtgaggtacttacgtggtttaccgaggggtcctcttatgtcgtcgaaggcaaacgtatggctggtgccgccgttgttgatggcacccgtactatctgggcaagcagcttacccgaaggcacgagtgctcagaaagcagagttgatggccttgacccaagccttacgccttgctgaagggaaatcgatcaatatttacaccgactcacgctatgcattcgccacggcacatgtacacggtgccatctacaaacaacgtggtttgttaacttctgctggccgcgagattaagaacaaagaagaaatcctttccttacttgaagccttacacctccccaaacgtctcgctattattcattgtccagggcatcagaaagcaaaagatcctatcagccgtgggaatcaaatggcagatcgtgtcgctaaacaggcagcccaaggcgttaacttgttgcccatgattgagacccctaaagctcca

SEQ ID NO: 330 - protein, 687 aa, synthetic construct
  REGION 1..687: note = Engineered reverse transcriptase variants
MHHHHHHGGSGVLTLQLDDEYRLYSPLVKPDQNIQFWLEQFPQAWAETGGMGLAKQVPPQVIQLKASATPVSVRQYPLSKEAQEGIRPHVQRLIQQGILVPVQSPWNTPLLPVRKPGTNDYRPVQDLREVNKRVQDIHPTVPNPYNLLCALPPQRSWYTVLDLKDAFFCLRLHPTSQPLFAFEWRDPDTGRTGQLTWTRLPQGFKNSPTIFDEALHRDLANFRIQHPQVTLLQYVDDLLLAGATKQDCLEGTKALLLELSDLGYRVSAKKAQICRREVTYLGYSLRDGQRWLTEARKKTVVQIPAPKTAKQMRMFLGTAGFCRLWIPGFATLAAPLYPLTKEKGEFSWAPEHQKAFDAIKKALLSAPALALPDVTKPFTLYVDERKGVARGVLTQTLGPWRRPVAYLSKKLDPVASGWPVCLKAIAAVAILVKDADKLTLGQNITVIAPHALENIVRQPPDRWMTNARMTHYQSLLLTERVTFAPPAALNPATLLPEETDEPVTHDCHQLLIEETGVRKDLTDIPLTGEVLTWFTEGSSYVVEGKRMAGAAVVDGTRTIWASSLPEGTSAQKAELMALTQALRLAEGKSINIYTDSRYAFATAHVHGAIYKQRGLLTSAGREIKNKEEILSLLEALHLPKRLAIIHCPGHQKAKDPISRGNQMADRVAKQAAQGVNLLPMIETPKAP

SEQ ID NO: 331 - DNA, 2061 bp, synthetic construct
  misc_feature 1..2061: note = Engineered reverse transcriptase variants
  source 1..2061: mol_type = other DNA
atgcatcaccatcaccatcatggtggtagcggagtgctgacccttcagctggatgatgaatatcgcttgtacagtccgctggtcaaaccagaccaaaacattcagttctggctcgaacagtttccgcaagcgtgggctgaaactggtggcatgggcctggccaaacaggttcctcctcaggtaatccaattaaaggcatctgccacgccggtgtcagttcgtcagtatccgctgtcgaaagaagcgcaagaggggattcgcccacacgtgcagcgtttgatccagcagggcattctggtaccggttcaaagcccctggaataccccgcttttaccagtccgcaaaccgggtacaaacgattaccgtcctgtgcaagacctgcgcctggtcaataaacgtgtgcaggatatccacccaaccgttccgaacccgtataatctgttgtgcgcgttaccgccgcagcgttcctggtacacggtgctggacctgaaggacgcgttcttctgtcttcgcctccatcccaccagccagccactgtttgcctttgaatggcgcgatcctgatacgggccgtactgggcaattaacatggacccgtttgccgcagggctttaagaacagtcccacgatctttgatgaggctcttcaccgcgacctcgcaaatttccgcatccaacacccacaggtaacgttactccagtatgtcgatgatcttttgttagcgggtgccaccaaacaggactgcttggaaggaacgaaagcacttctcttggaactctcggatttaggttatcgtgtgtccgccaagaaagctcagatttgtcgccgcgaagtgacatacttaggctattcattgcgtgatggtcaacgttggcttactgaggcgcgcaagaagaccgttgttcaaatccccgcccctaagaccgcgaaacagatgcgtgaatttcttggcacggcaggtttctgccgtttgtggattcctggctttgctacgttagcggcacccctctatccactcacgaaagagaaaggagaattctcttgggccccagaacatcagaaagcgtttgacgccatcaagaaagcgttattaagcgctcctgctcttgcattgcccgatgtcaccaaaccattcacgctctacgtggatgaacgcaaaggcgtagcccgcggtgtgttgacacagaccttaggaccttggcgtcgtcccgtggcctacctctcgaagaaacttgacccagttgcaagtggttggcctgtctgcttgaaagctattgccgcagttgcaatcctcgtcaaagatgccgacaaacttactttgggccagaacattactgttattgcaccacacgcccttgaaaacatcgttcgtcagccacctgatcgctggatgaccaatgctcgcatgacgcattatcagagcctcttgcttaccgaacgcgtgacttttgctccacctgcagccttaaaccccgcaacccttttacccgaagaaacagatgagcctgtgacgcatgactgtcaccagctcttgattgaagaaactggcgtacgcaaagacctcaccgatattccattaacaggtgaggtacttacgtggtttaccgaggggtcctcttatgtcgtcgaaggcaaacgtatggctggtgccgccgttgttgatggcacccgtactatctgggcaagcagcttacccgaaggcacgagtgctcagaaagcagagttgatggccttgacccaagccttacgccttgctgaagggaaatcgatcaatatttacaccgactcacgctatgcattcgccacggcacatgtacacggtgccatctacaaacaacgtggtttgttaacttctgctggccgcgagattaagaacaaagaagaaatcctttccttacttgaagccttacacctccccaaacgtctcgctattattcattgtccagggcatcagaaagcaaaagatcctatcagccgtgggaatcaaatggcagatcgtgtcgctaaacaggcagcccaaggcgttaacttgttgcccatgattgagacccctaaagctcca

SEQ ID NO: 332 - protein, 687 aa, synthetic construct
  REGION 1..687: note = Engineered reverse transcriptase variants
MHHHHHHGGSGVLTLQLDDEYRLYSPLVKPDQNIQFWLEQFPQAWAETGGMGLAKQVPPQVIQLKASATPVSVRQYPLSKEAQEGIRPHVQRLIQQGILVPVQSPWNTPLLPVRKPGTNDYRPVQDLRLVNKRVQDIHPTVPNPYNLLCALPPQRSWYTVLDLKDAFFCLRLHPTSQPLFAFEWRDPDTGRTGQLTWTRLPQGFKNSPTIFDEALHRDLANFRIQHPQVTLLQYVDDLLLAGATKQDCLEGTKALLLELSDLGYRVSAKKAQICRREVTYLGYSLRDGQRWLTEARKKTVVQIPAPKTAKQMREFLGTAGFCRLWIPGFATLAAPLYPLTKEKGEFSWAPEHQKAFDAIKKALLSAPALALPDVTKPFTLYVDERKGVARGVLTQTLGPWRRPVAYLSKKLDPVASGWPVCLKAIAAVAILVKDADKLTLGQNITVIAPHALENIVRQPPDRWMTNARMTHYQSLLLTERVTFAPPAALNPATLLPEETDEPVTHDCHQLLIEETGVRKDLTDIPLTGEVLTWFTEGSSYVVEGKRMAGAAVVDGTRTIWASSLPEGTSAQKAELMALTQALRLAEGKSINIYTDSRYAFATAHVHGAIYKQRGLLTSAGREIKNKEEILSLLEALHLPKRLAIIHCPGHQKAKDPISRGNQMADRVAKQAAQGVNLLPMIETPKAP

SEQ ID NO: 333 - DNA, 2061 bp, synthetic construct
  misc_feature 1..2061: note = Engineered reverse transcriptase variants
  source 1..2061: mol_type = other DNA
atgcatcaccatcaccatcatggtggtagcggagtgctgacccttcagctggatgatgaatatcgcttgtacagtccgctggtcaaaccagaccaaaacattcagttctggctcgaacagtttccgcaagcgtgggctgaaactggtggcatgggcctggccaaacaggttcctcctcaggtaatccaattaaaggcatctgccacgccggtgtcagttcgtcagtatccgctgtcgaaagaagcgcaagaggggattcgcccacacgtgcagcgtttgatccagcagggcattctggtaccggttcaaagcccctggaataccccgcttttaccagtccgcaaaccgggtacaaacgattaccgtcctgtgcaagacctgcgcgaagtcaataaacgtgtgcaggatatccacccaaccgttccgaacccgtataatctgttgtgcgcgttaccgccgcagcgttcctggtacacggtgctggacctgaaggacgcgttcttctgtcttcgcctccatcccaccagccagccactgtttgcctttgaatggcgcgatcctgatacgggccgtactgggcaattaacatggacccgtttgccgcagggctttaagaacagtcccacgatctttgatgaggctcttcaccgcgacctcgcaaatttccgcatccaacacccacaggtaacgttactccagtatgtcgatgatcttttgttagcgggtgccaccaaacaggactgcttggaaggaacgaaagcacttctcttggaactctcggatttaggttatcgtgtgtccgccaagaaagctcagatttgtcgccgcgaagtgacatacttaggctattcattgcgtgatggtcaacgttggcttactgaggcgcgcaagaagaccgttgttcaaatccccgcccctaagaccgcgaaacagatgcgtgaatttcttggcacggcaggtttctgccgtttgtggattcctggctttgctacgttagcggcacccctctatccactcacgaaagaggtgggagaattctcttgggccccagaacatcagaaagcgtttgacgccatcaagaaagcgttattaagcgctcctgctcttgcattgcccgatgtcaccaaaccattcacgctctacgtggatgaacgcaaaggcgtagcccgcggtgtgttgacacagaccttaggaccttggcgtcgtcccgtggcctacctctcgaagaaacttgacccagttgcaagtggttggcctgtctgcttgaaagctattgccgcagttgcaatcctcgtcaaagatgccgacaaacttactttgggccagaacattactgttattgcaccacacgcccttgaaaacatcgttcgtcagccacctgatcgctggatgaccaatgctcgcatgacgcattatcagagcctcttgcttaccgaacgcgtgacttttgctccacctgcagccttaaaccccgcaacccttttacccgaagaaacagatgagcctgtgacgcatgactgtcaccagctcttgattgaagaaactggcgtacgcaaagacctcaccgatattccattaacaggtgaggtacttacgtggtttaccgaggggtcctcttatgtcgtcgaaggcaaacgtatggctggtgccgccgttgttgatggcacccgtactatctgggcaagcagcttacccgaaggcacgagtgctcagaaagcagagttgatggccttgacccaagccttacgccttgctgaagggaaatcgatcaatatttacaccgactcacgctatgcattcgccacggcacatgtacacggtgccatctacaaacaacgtggtttgttaacttctgctggccgcgagattaagaacaaagaagaaatcctttccttacttgaagccttacacctccccaaacgtctcgctattattcattgtccagggcatcagaaagcaaaagatcctatcagccgtgggaatcaaatggcagatcgtgtcgctaaacaggcagcccaaggcgttaacttgttgcccatgattgagacccctaaagctcca

SEQ ID NO: 334 - protein, 687 aa, synthetic construct
  REGION 1..687: note = Engineered reverse transcriptase variants
MHHHHHHGGSGVLTLQLDDEYRLYSPLVKPDQNIQFWLEQFPQAWAETGGMGLAKQVPPQVIQLKASATPVSVRQYPLSKEAQEGIRPHVQRLIQQGILVPVQSPWNTPLLPVRKPGTNDYRPVQDLREVNKRVQDIHPTVPNPYNLLCALPPQRSWYTVLDLKDAFFCLRLHPTSQPLFAFEWRDPDTGRTGQLTWTRLPQGFKNSPTIFDEALHRDLANFRIQHPQVTLLQYVDDLLLAGATKQDCLEGTKALLLELSDLGYRVSAKKAQICRREVTYLGYSLRDGQRWLTEARKKTVVQIPAPKTAKQMREFLGTAGFCRLWIPGFATLAAPLYPLTKEVGEFSWAPEHQKAFDAIKKALLSAPALALPDVTKPFTLYVDERKGVARGVLTQTLGPWRRPVAYLSKKLDPVASGWPVCLKAIAAVAILVKDADKLTLGQNITVIAPHALENIVRQPPDRWMTNARMTHYQSLLLTERVTFAPPAALNPATLLPEETDEPVTHDCHQLLIEETGVRKDLTDIPLTGEVLTWFTEGSSYVVEGKRMAGAAVVDGTRTIWASSLPEGTSAQKAELMALTQALRLAEGKSINIYTDSRYAFATAHVHGAIYKQRGLLTSAGREIKNKEEILSLLEALHLPKRLAIIHCPGHQKAKDPISRGNQMADRVAKQAAQGVNLLPMIETPKAP

SEQ ID NO: 335 - DNA, 2061 bp, synthetic construct
  misc_feature 1..2061: note = Engineered reverse transcriptase variants
  source 1..2061: mol_type = other DNA
atgcatcaccatcaccatcatggtggtagcggagtgctgacccttcagctggatgatgaatatcgcttgtacagtccgctggtcaaaccagaccaaaacattcagttctggctcgaacagtttccgcaagcgtgggctgaaactggtggcatgggcctggccaaacaggttcctcctcaggtaatccaattaaaggcatctgccacgccggtgtcagttcgtcagtatccgctgtcgaaagaagcgcaagaggggattcgcccacacgtgcagcgtttgatccagcagggcattctggtaccggttcaaagcccctggaataccccgcttttaccagtccgcaaaccgggtacaaacgattaccgtcctgtgcaagacctgcgcgaagtcaataaacgtgtgcaggatatccacccaaccgttccgaacccgtataatctgttgtgcgcgttaccgccgcagcgttcctggtacacggtgctggacctgaaggacgcgttcttctgtcttcgcctccatcccaccagccagccactgtttgcctttgaatggcgcgatcctgatacgggccgtactgggcaattacattggacccgtttgccgcagggctttaagaacagtcccacgatctttgatgaggctcttcaccgcgacctcgcaaatttccgcatccaacacccacaggtaacgttactccagtatgtcgatgatcttttgttagcgggtgccaccaaacaggactgcttggaaggaacgaaagcacttctcttggaactctcggatttaggttatcgtgtgtccgccaagaaagctcagatttgtcgccgcgaagtgacatacttaggctattcattgcgtgatggtcaacgttggcttactgaggcgcgcaagaagaccgttgttcaaatccccgcccctaagaccgcgaaacagatgcgtgaatttcttggcacggcaggtttctgccgtttgtggattcctggctttgctacgttagcggcacccctctatccactcacgaaagagaaaggagaattctcttgggccccagaacatcagaaagcgtttgacgccatcaagaaagcgttattaagcgctcctgctcttgcattgcccgatgtcaccaaaccattcacgctctacgtggatgaacgcaaaggcgtagcccgcggtgtgttgacacagaccttaggaccttggcgtcgtcccgtggcctacctctcgaagaaacttgacccagttgcaagtggttggcctgtctgcttgaaagctattgccgcagttgcaatcctcgtcaaagatgccgacaaacttactttgggccagaacattactgttattgcaccacacgcccttgaaaacatcgttcgtcagccacctgatcgctggatgaccaatgctcgcatgacgcattatcagagcctcttgcttaccgaacgcgtgacttttgctccacctgcagccttaaaccccgcaacccttttacccgaagaaacagatgagcctgtgacgcatgactgtcaccagctcttgattgaagaaactggcgtacgcaaagacctcaccgatattccattaacaggtgaggtacttacgtggtttaccgaggggtcctcttatgtcgtcgaaggcaaacgtatggctggtgccgccgttgttgatggcacccgtactatctgggcaagcagcttacccgaaggcacgagtgctcagaaagcagagttgatggccttgacccaagccttacgccttgctgaagggaaatcgatcaatatttacaccgactcacgctatgcattcgccacggcacatgtacacggtgccatctacaaacaacgtggtttgttaacttctgctggccgcgagattaagaacaaagaagaaatcctttccttacttgaagccttacacctccccaaacgtctcgctattattcattgtccagggcatcagaaagcaaaagatcctatcagccgtgggaatcaaatggcagatcgtgtcgctaaacaggcagcccaaggcgttaacttgttgcccatgattgagacccctaaagctcca

SEQ ID NO: 336 - protein, 687 aa, synthetic construct
  REGION 1..687: note = Engineered reverse transcriptase variants
MHHHHHHGGSGVLTLQLDDEYRLYSPLVKPDQNIQFWLEQFPQAWAETGGMGLAKQVPPQVIQLKASATPVSVRQYPLSKEAQEGIRPHVQRLIQQGILVPVQSPWNTPLLPVRKPGTNDYRPVQDLREVNKRVQDIHPTVPNPYNLLCALPPQRSWYTVLDLKDAFFCLRLHPTSQPLFAFEWRDPDTGRTGQLHWTRLPQGFKNSPTIFDEALHRDLANFRIQHPQVTLLQYVDDLLLAGATKQDCLEGTKALLLELSDLGYRVSAKKAQICRREVTYLGYSLRDGQRWLTEARKKTVVQIPAPKTAKQMREFLGTAGFCRLWIPGFATLAAPLYPLTKEKGEFSWAPEHQKAFDAIKKALLSAPALALPDVTKPFTLYVDERKGVARGVLTQTLGPWRRPVAYLSKKLDPVASGWPVCLKAIAAVAILVKDADKLTLGQNITVIAPHALENIVRQPPDRWMTNARMTHYQSLLLTERVTFAPPAALNPATLLPEETDEPVTHDCHQLLIEETGVRKDLTDIPLTGEVLTWFTEGSSYVVEGKRMAGAAVVDGTRTIWASSLPEGTSAQKAELMALTQALRLAEGKSINIYTDSRYAFATAHVHGAIYKQRGLLTSAGREIKNKEEILSLLEALHLPKRLAIIHCPGHQKAKDPISRGNQMADRVAKQAAQGVNLLPMIETPKAP

SEQ ID NO: 337 - DNA, 2061 bp, synthetic construct
  misc_feature 1..2061: note = Engineered reverse transcriptase variants
  source 1..2061: mol_type = other DNA
atgcatcaccatcaccatcatggtggtagcggagtgctgacccttcagctggatgatgaatatcgcttgtacagtccgctggtcaaaccagaccaaaacattcagttctggctcgaacagtttccgcaagcgtgggctgaaactggtggcatgggcctggccaaacaggttcctcctcaggtaatccaattaaaggcatctgccacgccggtgtcagttatgcagtatccgctgtcgaaagaagcgcaagaggggattcgcccacacgtgcagcgtttgatccagcagggcattctggtaccggttcaaagcccctggaataccccgcttttaccagtccgcaaaccgggtacaaacgattaccgtcctgtgcaagacctgcgcgaagtcaataaacgtgtgcaggatatccacccaaccgttccgaacccgtataatctgttgtgcgcgttaccgccgcagcgttcctggtacacggtgctggacctgaaggacgcgttcttctgtcttcgcctccatcccaccagccagccactgtttgcctttgaatggcgcgatcctgatacgggccgtactgggcaattaacatggacccgtttgccgcagggctttaagaacagtcccacgatctttgatgaggctcttcaccgcgacctcgcaaatttccgcatccaacacccacaggtaacgttactccagtatgtcgatgatcttttgttagcgggtgccaccaaacaggactgcttggaaggaacgaaagcacttctcttggaactctcggatttaggttatcgtgtgtccgccaagaaagctcagatttgtcgccgcgaagtgacatacttaggctattcattgcgtgatggtcaacgttggcttactgaggcgcgcaagaagaccgttgttcaaatccccgcccctaagaccgcgaaacagatgcgtgaatttcttggcacggcaggtttctgccgtttgtggattcctggctttgctacgttagcggcacccctctatccactcacgaaagagaaaggagaattctcttgggccccagaacatcagaaagcgtttgacgccatcaagaaagcgttattaagcgctcctgctcttgcattgcccgatgtcaccaaaccattcacgctctacgtggatgaacgcaaaggcgtagcccgcggtgtgttgacacagaccttaggaccttggcgtcgtcccgtggcctacctctcgaagaaacttgacccagttgcaagtggttggcctgtctgcttgaaagctattgccgcagttgcaatcctcgtcaaagatgccgacaaacttactttgggccagaacattactgttattgcaccacacgcccttgaaaacatcgttcgtcagccacctgatcgctggatgaccaatgctcgcatgacgcattatcagagcctcttgcttaccgaacgcgtgacttttgctccacctgcagccttaaaccccgcaacccttttacccgaagaaacagatgagcctgtgacgcatgactgtcaccagctcttgattgaagaaactggcgtacgcaaagacctcaccgatattccattaacaggtgaggtacttacgtggtttaccgaggggtcctcttatgtcgtcgaaggcaaacgtatggctggtgccgccgttgttgatggcacccgtactatctgggcaagcagcttacccgaaggcacgagtgctcagaaagcagagttgatggccttgacccaagccttacgccttgctgaagggaaatcgatcaatatttacaccgactcacgctatgcattcgccacggcacatgtacacggtgccatctacaaacaacgtggtttgttaacttctgctggccgcgagattaagaacaaagaagaaatcctttccttacttgaagccttacacctccccaaacgtctcgctattattcattgtccagggcatcagaaagcaaaagatcctatcagccgtgggaatcaaatggcagatcgtgtcgctaaacaggcagcccaaggcgttaacttgttgcccatgattgagacccctaaagctcca

SEQ ID NO: 338 - protein, 687 aa, synthetic construct
  REGION 1..687: note = Engineered reverse transcriptase variants
MHHHHHHGGSGVLTLQLDDEYRLYSPLVKPDQNIQFWLEQFPQAWAETGGMGLAKQVPPQVIQLKASATPVSVMQYPLSKEAQEGIRPHVQRLIQQGILVPVQSPWNTPLLPVRKPGTNDYRPVQDLREVNKRVQDIHPTVPNPYNLLCALPPQRSWYTVLDLKDAFFCLRLHPTSQPLFAFEWRDPDTGRTGQLTWTRLPQGFKNSPTIFDEALHRDLANFRIQHPQVTLLQYVDDLLLAGATKQDCLEGTKALLLELSDLGYRVSAKKAQICRREVTYLGYSLRDGQRWLTEARKKTVVQIPAPKTAKQMREFLGTAGFCRLWIPGFATLAAPLYPLTKEKGEFSWAPEHQKAFDAIKKALLSAPALALPDVTKPFTLYVDERKGVARGVLTQTLGPWRRPVAYLSKKLDPVASGWPVCLKAIAAVAILVKDADKLTLGQNITVIAPHALENIVRQPPDRWMTNARMTHYQSLLLTERVTFAPPAALNPATLLPEETDEPVTHDCHQLLIEETGVRKDLTDIPLTGEVLTWFTEGSSYVVEGKRMAGAAVVDGTRTIWASSLPEGTSAQKAELMALTQALRLAEGKSINIYTDSRYAFATAHVHGAIYKQRGLLTSAGREIKNKEEILSLLEALHLPKRLAIIHCPGHQKAKDPISRGNQMADRVAKQAAQGVNLLPMIETPKAP

SEQ ID NO: 339 - DNA, 2061 bp, synthetic construct
  misc_feature 1..2061: note = Engineered reverse transcriptase variants
  source 1..2061: mol_type = other DNA
atgcatcaccatcaccatcatggtggtagcggagtgctgacccttcagctggatgatgaatatcgcttgtacagtccgctggtcaaaccagaccaaaacattcagttctggctcgaacagtttccgcaagcgtgggctgaaactggtggcatgggcctggccaaacaggttcctcctcaggtaatccaattaaaggcatctgccacgccggtgtcagttcgtcagtatccgctgtcgaaagaagcgcaagaggggattcgcccacacgtgcagcgtttgatccagcagggcattctggtaccggttcaaagcccctggaataccccgcttttaccagtccgcaaaccgggtacaaacgattaccgtcctgtgcaagacctgcgcgaagtcaataaacgtgtgcaggatatccacccaaccgttccgaacccgtataatctgttgtgcgcgttaccgccgcagcgttcctggtacacggtgctggacctgaaggacgcgttcttctgtcttcgcctccatcccaccagccagccactgtttgcctttgaatggcgcgatcctgatacgggccgtactgggcaattaacatggacccgtttgccgcagggctttaagaacagtcccacgatctttgatgaggctcttcaccgcgacctcgcaaatttccgcatccaacacccacaggtaacgttactccagtatgtcgatgatcttttgttagcgggtgccaccaaacaggactgcttggaaggaacgaaagcacttctcttggaactctcggatttaggttatcgtgtgtccgccaagaaagctcagatttgtcgccgcgaagtgacatacttaggctattcattgcgtgatggtcaacgttggcttactgaggcgcgcaagaagaccgttgttcaaatccccgcccctaagaccgcgaaacagatgcgtgaatttcttggcacggcaggtttctgccgtttgtggattcctggctttgctacgttagcggcacccctctatccactcacgaaagagaaaggagaattctcttgggccccagaacatcagaaagcgcctgacgccatcaagaaagcgttattaagcgctcctgctcttgcattgcccgatgtcaccaaaccattcacgctctacgtggatgaacgcaaaggcgtagcccgcggtgtgttgacacagaccttaggaccttggcgtcgtcccgtggcctacctctcgaagaaacttgacccagttgcaagtggttggcctgtctgcttgaaagctattgccgcagttgcaatcctcgtcaaagatgccgacaaacttactttgggccagaacattactgttattgcaccacacgcccttgaaaacatcgttcgtcagccacctgatcgctggatgaccaatgctcgcatgacgcattatcagagcctcttgcttaccgaacgcgtgacttttgctccacctgcagccttaaaccccgcaacccttttacccgaagaaacagatgagcctgtgacgcatgactgtcaccagctcttgattgaagaaactggcgtacgcaaagacctcaccgatattccattaacaggtgaggtacttacgtggtttaccgaggggtcctcttatgtcgtcgaaggcaaacgtatggctggtgccgccgttgttgatggcacccgtactatctgggcaagcagcttacccgaaggcacgagtgctcagaaagcagagttgatggccttgacccaagccttacgccttgctgaagggaaatcgatcaatatttacaccgactcacgctatgcattcgccacggcacatgtacacggtgccatctacaaacaacgtggtttgttaacttctgctggccgcgagattaagaacaaagaagaaatcctttccttacttgaagccttacacctccccaaacgtctcgctattattcattgtccagggcatcagaaagcaaaagatcctatcagccgtgggaatcaaatggcagatcgtgtcgctaaacaggcagcccaaggcgttaacttgttgcccatgattgagacccctaaagctcca

SEQ ID NO: 340 - protein, 687 aa, synthetic construct
  REGION 1..687: note = Engineered reverse transcriptase variants
MHHHHHHGGSGVLTLQLDDEYRLYSPLVKPDQNIQFWLEQFPQAWAETGGMGLAKQVPPQVIQLKASATPVSVRQYPLSKEAQEGIRPHVQRLIQQGILVPVQSPWNTPLLPVRKPGTNDYRPVQDLREVNKRVQDIHPTVPNPYNLLCALPPQRSWYTVLDLKDAFFCLRLHPTSQPLFAFEWRDPDTGRTGQLTWTRLPQGFKNSPTIFDEALHRDLANFRIQHPQVTLLQYVDDLLLAGATKQDCLEGTKALLLELSDLGYRVSAKKAQICRREVTYLGYSLRDGQRWLTEARKKTVVQIPAPKTAKQMREFLGTAGFCRLWIPGFATLAAPLYPLTKEKGEFSWAPEHQKAPDAIKKALLSAPALALPDVTKPFTLYVDERKGVARGVLTQTLGPWRRPVAYLSKKLDPVASGWPVCLKAIAAVAILVKDADKLTLGQNITVIAPHALENIVRQPPDRWMTNARMTHYQSLLLTERVTFAPPAALNPATLLPEETDEPVTHDCHQLLIEETGVRKDLTDIPLTGEVLTWFTEGSSYVVEGKRMAGAAVVDGTRTIWASSLPEGTSAQKAELMALTQALRLAEGKSINIYTDSRYAFATAHVHGAIYKQRGLLTSAGREIKNKEEILSLLEALHLPKRLAIIHCPGHQKAKDPISRGNQMADRVAKQAAQGVNLLPMIETPKAP

SEQ ID NO: 341 - DNA, 2061 bp, synthetic construct
  misc_feature 1..2061: note = Engineered reverse transcriptase variants
  source 1..2061: mol_type = other DNA
atgcatcaccatcaccatcatggtggtagcggagtgctgacccttcagctggatgatgaatatcgcttgtacagtccgctggtcaaaccagaccaaaacattcagttctggctcgaacagtttccgcaagcgtgggctgaaactggtggcatgggcctggccaaacaggttcctcctcaggtaatccaattaaaggcatctgccacgccggtgtcagttcgtcagtatccgctgtcgaaagaagcgcaagaggggattcgcccagcggtgcagcgtttgatccagcagggcattctggtaccggttcaaagcccctggaataccccgcttttaccagtccgcaaaccgggtacaaacgattaccgtcctgtgcaagacctgcgcgaagtcaataaacgtgtgcaggatatccacccaaccgttccgaacccgtataatctgttgtgcgcgttaccgccgcagcgttcctggtacacggtgctggacctgaaggacgcgttcttctgtcttcgcctccatcccaccagccagccactgtttgcctttgaatggcgcgatcctgatacgggccgtactgggcaattaacatggacccgtttgccgcagggctttaagaacagtcccacgatctttgatgaggctcttcaccgcgacctcgcaaatttccgcatccaacacccacaggtaacgttactccagtatgtcgatgatcttttgttagcgggtgccaccaaacaggactgcttggaaggaacgaaagcacttctcttggaactctcggatttaggttatcgtgtgtccgccaagaaagctcagatttgtcgccgcgaagtgacatacttaggctattcattgcgtgatggtcaacgttggcttactgaggcgcgcaagaagaccgttgttcaaatccccgcccctaagaccgcgaaacagatgcgtgaatttcttggcacggcaggtttctgccgtttgtggattcctggctttgctacgttagcggcacccctctatccactcacgaaagagaaaggagaattctcttgggccccagaacatcagaaagcgtttgacgccatcaagaaagcgttattaagcgctcctgctcttgcattgcccgatgtcaccaaaccattcacgctctacgtggatgaacgcaaaggcgtagcccgcggtgtgttgacacagaccttaggaccttggcgtcgtcccgtggcctacctctcgaagaaacttgacccagttgcaagtggttggcctgtctgcttgaaagctattgccgcagttgcaatcctcgtcaaagatgccgacaaacttactttgggccagaacattactgttattgcaccacacgcccttgaaaacatcgttcgtcagccacctgatcgctggatgaccaatgctcgcatgacgcattatcagagcctcttgcttaccgaacgcgtgacttttgctccacctgcagccttaaaccccgcaacccttttacccgaagaaacagatgagcctgtgacgcatgactgtcaccagctcttgattgaagaaactggcgtacgcaaagacctcaccgatattccattaacaggtgaggtacttacgtggtttaccgaggggtcctcttatgtcgtcgaaggcaaacgtatggctggtgccgccgttgttgatggcacccgtactatctgggcaagcagcttacccgaaggcacgagtgctcagaaagcagagttgatggccttgacccaagccttacgccttgctgaagggaaatcgatcaatatttacaccgactcacgctatgcattcgccacggcacatgtacacggtgccatctacaaacaacgtggtttgttaacttctgctggccgcgagattaagaacaaagaagaaatcctttccttacttgaagccttacacctccccaaacgtctcgctattattcattgtccagggcatcagaaagcaaaagatcctatcagccgtgggaatcaaatggcagatcgtgtcgctaaacaggcagcccaaggcgttaacttgttgcccatgattgagacccctaaagctcca

SEQ ID NO: 342 - protein, 687 aa, synthetic construct
  REGION 1..687: note = Engineered reverse transcriptase variants
MHHHHHHGGSGVLTLQLDDEYRLYSPLVKPDQNIQFWLEQFPQAWAETGGMGLAKQVPPQVIQLKASATPVSVRQYPLSKEAQEGIRPAVQRLIQQGILVPVQSPWNTPLLPVRKPGTNDYRPVQDLREVNKRVQDIHPTVPNPYNLLCALPPQRSWYTVLDLKDAFFCLRLHPTSQPLFAFEWRDPDTGRTGQLTWTRLPQGFKNSPTIFDEALHRDLANFRIQHPQVTLLQYVDDLLLAGATKQDCLEGTKALLLELSDLGYRVSAKKAQICRREVTYLGYSLRDGQRWLTEARKKTVVQIPAPKTAKQMREFLGTAGFCRLWIPGFATLAAPLYPLTKEKGEFSWAPEHQKAFDAIKKALLSAPALALPDVTKPFTLYVDERKGVARGVLTQTLGPWRRPVAYLSKKLDPVASGWPVCLKAIAAVAILVKDADKLTLGQNITVIAPHALENIVRQPPDRWMTNARMTHYQSLLLTERVTFAPPAALNPATLLPEETDEPVTHDCHQLLIEETGVRKDLTDIPLTGEVLTWFTEGSSYVVEGKRMAGAAVVDGTRTIWASSLPEGTSAQKAELMALTQALRLAEGKSINIYTDSRYAFATAHVHGAIYKQRGLLTSAGREIKNKEEILSLLEALHLPKRLAIIHCPGHQKAKDPISRGNQMADRVAKQAAQGVNLLPMIETPKAP

SEQ ID NO: 343 - DNA, 2061 bp, synthetic construct
  misc_feature 1..2061: note = Engineered reverse transcriptase variants
  source 1..2061: mol_type = other DNA
atgcatcaccatcaccatcatggtggtagcggagtgctgacccttcagctggatgatgaatatcgcttgtacagtccgctggtcaaaccagaccaaaacattcagttctggctcgaacagtttccgcaagcgtgggctgaaactggtggcatgggcctggccaaacaggttcctcctcaggtaatccaattaaaggcatctgccacgccggtgtcagttcgtcagtatccgctgtcgaaagaagcgcaagaggggattcgcccacacgtgcagcgtttgatccagcagggcattctggtaccggttcaaagcccctggaataccccgcttttaccagtccgcaaaccgggtacaaacgattaccgtcctgtgcaagacctgcgcgaagtcaataaacgtgtgcaggatatccacccaaccgttccgaacccgtataatctgttgtgcgcgttaccgccgcagcgttcctggtacacggtgctggacctgaaggacgcgttcttctgtcttcgcctccatcccaccagccagccactgtttgcctttgaatggcgcgatcctgatacgggccgtactgggcaattaacatggacccgtttgccgcagggctttaagaacagtcccacgatctttgttgaggctcttcaccgcgacctcgcaaatttccgcatccaacacccacaggtaacgttactccagtatgtcgatgatcttttgttagcgggtgccaccaaacaggactgcttggaaggaacgaaagcacttctcttggaactctcggatttaggttatcgtgtgtccgccaagaaagctcagatttgtcgccgcgaagtgacatacttaggctattcattgcgtgatggtcaacgttggcttactgaggcgcgcaagaagaccgttgttcaaatccccgcccctaagaccgcgaaacagatgcgtgaatttcttggcacggcaggtttctgccgtttgtggattcctggctttgctacgttagcggcacccctctatccactcacgaaagagaaaggagaattctcttgggccccagaacatcagaaagcgtttgacgccatcaagaaagcgttattaagcgctcctgctcttgcattgcccgatgtcaccaaaccattcacgctctacgtggatgaacgcaaaggcgtagcccgcggtgtgttgacacagaccttaggaccttggcgtcgtcccgtggcctacctctcgaagaaacttgacccagttgcaagtggttggcctgtctgcttgaaagctattgccgcagttgcaatcctcgtcaaagatgccgacaaacttactttgggccagaacattactgttattgcaccacacgcccttgaaaacatcgttcgtcagccacctgatcgctggatgaccaatgctcgcatgacgcattatcagagcctcttgcttaccgaacgcgtgacttttgctccacctgcagccttaaaccccgcaacccttttacccgaagaaacagatgagcctgtgacgcatgactgtcaccagctcttgattgaagaaactggcgtacgcaaagacctcaccgatattccattaacaggtgaggtacttacgtggtttaccgaggggtcctcttatgtcgtcgaaggcaaacgtatggctggtgccgccgttgttgatggcacccgtactatctgggcaagcagcttacccgaaggcacgagtgctcagaaagcagagttgatggccttgacccaagccttacgccttgctgaagggaaatcgatcaatatttacaccgactcacgctatgcattcgccacggcacatgtacacggtgccatctacaaacaacgtggtttgttaacttctgctggccgcgagattaagaacaaagaagaaatcctttccttacttgaagccttacacctccccaaacgtctcgctattattcattgtccagggcatcagaaagcaaaagatcctatcagccgtgggaatcaaatggcagatcgtgtcgctaaacaggcagcccaaggcgttaacttgttgcccatgattgagacccctaaagctcca

SEQ ID NO: 344 - protein, 687 aa, synthetic construct
  REGION 1..687: note = Engineered reverse transcriptase variants
MHHHHHHGGSGVLTLQLDDEYRLYSPLVKPDQNIQFWLEQFPQAWAETGGMGLAKQVPPQVIQLKASATPVSVRQYPLSKEAQEGIRPHVQRLIQQGILVPVQSPWNTPLLPVRKPGTNDYRPVQDLREVNKRVQDIHPTVPNPYNLLCALPPQRSWYTVLDLKDAFFCLRLHPTSQPLFAFEWRDPDTGRTGQLTWTRLPQGFKNSPTIFVEALHRDLANFRIQHPQVTLLQYVDDLLLAGATKQDCLEGTKALLLELSDLGYRVSAKKAQICRREVTYLGYSLRDGQRWLTEARKKTVVQIPAPKTAKQMREFLGTAGFCRLWIPGFATLAAPLYPLTKEKGEFSWAPEHQKAFDAIKKALLSAPALALPDVTKPFTLYVDERKGVARGVLTQTLGPWRRPVAYLSKKLDPVASGWPVCLKAIAAVAILVKDADKLTLGQNITVIAPHALENIVRQPPDRWMTNARMTHYQSLLLTERVTFAPPAALNPATLLPEETDEPVTHDCHQLLIEETGVRKDLTDIPLTGEVLTWFTEGSSYVVEGKRMAGAAVVDGTRTIWASSLPEGTSAQKAELMALTQALRLAEGKSINIYTDSRYAFATAHVHGAIYKQRGLLTSAGREIKNKEEILSLLEALHLPKRLAIIHCPGHQKAKDPISRGNQMADRVAKQAAQGVNLLPMIETPKAP

SEQ ID NO: 345 - DNA, 2061 bp, synthetic construct
  misc_feature 1..2061: note = Engineered reverse transcriptase variants
  source 1..2061: mol_type = other DNA
atgcatcaccatcaccatcatggtggtagcggagtgctgacccttcagctggatgatgaatatcgcttgtacagtccgctggtcaaaccagaccaaaacattcagttctggctcgaacagtttccgcaagcgtgggctgaaactggtggcatgggcctggccaaacaggttcctcctcaggtaatccaattaaaggcatctgccacgccggtgtcagttcgtcagtatccgctgtcgaaagaagcgcaagaggggattcgcccacacgtgcagcgtttgatccagcagggcattctggtaccggttcaaagcccctggaataccccgcttttaccagtccgcaaaccgggtacaaacgattaccgtcctgtgcaagacctgcgcgaagtcaataaacgtgtgcaggatatccacccaaccgttccgaacccgtataatctgttgtgcgcgttaccgccgcagcgttcctggtacacggtgctggacctgaaggacgcgttcttctgtcttcgcctccatcccaccagccagccactgtttgcctttgaatggcgcgatcctgatacgggccgtactgggcaattaacatggacccgtttgccgcagggctttaagaacagtcccacgatctttgatgaggctcttcaccgcgacctcgcaaatttccgcatccaacacccacaggtaacgttactccagtatgtcgatgatcttttgttagcgggtgccaccaaacaggactgcttggaaggaacgaaagcacttctcttggaactctcggatttaggttatcgtgtgtccgccaagaaagctcagatttgtcgccgcgaagtgacatacttaggctattcattgcgtgatggtcaacgttggcttactgaggcgcgcaagaagaccgttgttcaaatccccgcccctaagaccgcgaaacagatgcgtgaatttcttggcacggcaggtttctgccgtttgtggattcctggctttgctacgttagcggcacccctctatccactcacgaaagagaaaggagaattctcttgggccccagaacatcagaaagcgtttgacgccatcaagaaagcgttattaagcgctcctgctcttgcattgcccgatgtcaccaaaccattcacgctctacgtggatgaacgcaaaggcgtagcccgcggtgtgttgacacagaccttaggaccttggcgtcgtcccgtggcctacctctcgaagaaacttgacccagttgcaagtggttggcctgtctgcttgaaagctattgccgcagttgcaatcctcgtcaaagatgccgacaaacttactttgggccagaacctgactgttattgcaccacacgcccttgaaaacatcgttcgtcagccacctgatcgctggatgaccaatgctcgcatgacgcattatcagagcctcttgcttaccgaacgcgtgacttttgctccacctgcagccttaaaccccgcaacccttttacccgaagaaacagatgagcctgtgacgcatgactgtctggaactcttgattgaagaaactggcgtacgcaaagacctcaccgatattccattaacaggtgaggtacttacgtggtttaccgaggggtcctcttatgtcgtcgaaggcaaacgtatggctggtgccgccgttgttgatggcacccgtactatctgggcaagcagcttacccgaaggcacgagtgctcagaaagcagatttgatggccttgacccaagccttacgccttgctgaagggaaatcgatcaatatttacaccgattcacgctatgcattcgccacggcacatgtacacggtgccatctacaaacaacgtggtttgttaacttctgctggccgcgagattaagaacaaagaagaaatcctttccttacttgaagccttacacctccccaaacgtctcgctattattcattgtccagggcatcagaaagcaaaagatcctatcagccgtgggaatcaaatggcagatcgtgtcgctaaacaggcagcccaaggcgttaacttgttgcccatgattgagacccctaaagctcca

SEQ ID NO: 346 - protein, 687 aa, synthetic construct
  REGION 1..687: note = Engineered reverse transcriptase variants
MHHHHHHGGSGVLTLQLDDEYRLYSPLVKPDQNIQFWLEQFPQAWAETGGMGLAKQVPPQVIQLKASATPVSVRQYPLSKEAQEGIRPHVQRLIQQGILVPVQSPWNTPLLPVRKPGTNDYRPVQDLREVNKRVQDIHPTVPNPYNLLCALPPQRSWYTVLDLKDAFFCLRLHPTSQPLFAFEWRDPDTGRTGQLTWTRLPQGFKNSPTIFDEALHRDLANFRIQHPQVTLLQYVDDLLLAGATKQDCLEGTKALLLELSDLGYRVSAKKAQICRREVTYLGYSLRDGQRWLTEARKKTVVQIPAPKTAKQMREFLGTAGFCRLWIPGFATLAAPLYPLTKEKGEFSWAPEHQKAFDAIKKALLSAPALALPDVTKPFTLYVDERKGVARGVLTQTLGPWRRPVAYLSKKLDPVASGWPVCLKAIAAVAILVKDADKLTLGQNLTVIAPHALENIVRQPPDRWMTNARMTHYQSLLLTERVTFAPPAALNPATLLPEETDEPVTHDCLELLIEETGVRKDLTDIPLTGEVLTWFTEGSSYVVEGKRMAGAAVVDGTRTIWASSLPEGTSAQKADLMALTQALRLAEGKSINIYTDSRYAFATAHVHGAIYKQRGLLTSAGREIKNKEEILSLLEALHLPKRLAIIHCPGHQKAKDPISRGNQMADRVAKQAAQGVNLLPMIETPKAP

SEQ ID NO: 347 - DNA, 2061 bp, synthetic construct
  misc_feature 1..2061: note = Engineered reverse transcriptase variants
  source 1..2061: mol_type = other DNA
atgcatcaccatcaccatcatggtggtagcggagtgctgacccttcagctggatgatgaatatcgcttgtacagtccgctggtcaaaccagaccaaaacattcagttctggctcgaacagtttccgcaagcgtgggctgaaactggtggcatgggcctggccaaacaggttcctcctcaggtaatcctgttaaaggcatctgccacgccggtgtcagttcgtcagtatccgctgtcgaaagaagcgcaagaggggattcgcccacacgtgcagcgtttgatccagcagggcattctggtaccggttcaaagcccctggaataccccgcttttaccagtccgcaaaccgggtacaaacgattaccgtcctgtgcaagacctgcgcgaagtcaataaacgtgtgcaggatatccacccaaccgttccgaacccgtataatctgttgtgcgcgttaccgccgcagcgttcctggtacacggtgctggacctgaaggacgcgttcttctgtcttcgcctccaccccaccagccagccactgtttgcctttgaatggcgcgatcctgatacgggccgtactgggcaattaacatggacccgtttgccgcagggctttaagaacagtcccacgatctttgatgaggctcttcaccgcgacctcgcaaatttccgcatccaacacccacaggtaacgttactccagtatgtcgatgatcttttgttagcgggtgccaccaaacaggactgcttggaaggaacgaaagcacttctcttggaactcggtgatttaggttatcgtgtgtccgccaagaaagctcagatttgtcgccgcgaagtgacatacttaggctattcattgcgtgatggtcaacgttggcttactgaggcgcgcaagcgtaccatcgttcaaatccccgcccctaagaccgcgaaacagatgcgtgaatttcttggcacggcaggtttctgccgtttgtggattcctggctttgctgagttagcggcacccctctatccactcacgaaagagaaaggagaattctcttgggccccagaacatcagaaagcgtttgacgccatcaagaaagcgttattaagcgctcctgctcttgcattgcccgatgtcaccaaaccattcacgctctacgtggatgaacgcaaaggcgtagcccgcggtgtgttgacacagaccttaggaccttggcgtcgtcccgtggcctacctctcgaagaaacttgacccagttgcaagtggttggcctgtctgcttgaaagctattgccgcagttgcaatcctcgtcaaagatgccgacaaacttactttgggccagaacctgactgttattgcaccacacgcccttgaaaacatcgttcgtcagccacctgatcgctggatgaccaatgctcgcatgacgcattatcagagcctcttgcttaccgaacgcgtgacttttgctccacctgcagccttaaaccccgcaacccttttacccgaagaaacagatgagcctgtgacgcatgactgtcatgaactcttgattgaagaaactggcgtacgcaaagacctcaccgatattccattaacaggtgaggtacttacgtggtttaccgaggggtcctcttatgtcgtcgaaggcaaacgtatggctggtgccgccgttgttgatggcacccgtactatctgggcaagcagcttacccgaaggcacgagtgctcagaaagcagagttgatggccttgacccaagccttacgccttgctgaagggaaatcgatcaatatttacaccgactcacgctatgcattcgccacggcacatgtacacggtgccatctacaaacaacgtggtttgttaacttctgctggccgcgagattaagaacaaagaagaaatcctttccttacttgaagccttacacctccccaaacgtctcgctattattcattgtccagggcatcagaaagcaaaagatcctatcagccgtgggaatcaaatggcagatcgtgtcgctaaacaggcagcccaaggcgttaacttgttgcccatgattgagacccctaaagctcca

SEQ ID NO: 348 - protein, 687 aa, synthetic construct
  REGION 1..687: note = Engineered reverse transcriptase variants
MHHHHHHGGSGVLTLQLDDEYRLYSPLVKPDQNIQFWLEQFPQAWAETGGMGLAKQVPPQVILLKASATPVSVRQYPLSKEAQEGIRPHVQRLIQQGILVPVQSPWNTPLLPVRKPGTNDYRPVQDLREVNKRVQDIHPTVPNPYNLLCALPPQRSWYTVLDLKDAFFCLRLHPTSQPLFAFEWRDPDTGRTGQLTWTRLPQGFKNSPTIFDEALHRDLANFRIQHPQVTLLQYVDDLLLAGATKQDCLEGTKALLLELGDLGYRVSAKKAQICRREVTYLGYSLRDGQRWLTEARKRTIVQIPAPKTAKQMREFLGTAGFCRLWIPGFAELAAPLYPLTKEKGEFSWAPEHQKAFDAIKKALLSAPALALPDVTKPFTLYVDERKGVARGVLTQTLGPWRRPVAYLSKKLDPVASGWPVCLKAIAAVAILVKDADKLTLGQNLTVIAPHALENIVRQPPDRWMTNARMTHYQSLLLTERVTFAPPAALNPATLLPEETDEPVTHDCHELLIEETGVRKDLTDIPLTGEVLTWFTEGSSYVVEGKRMAGAAVVDGTRTIWASSLPEGTSAQKAELMALTQALRLAEGKSINIYTDSRYAFATAHVHGAIYKQRGLLTSAGREIKNKEEILSLLEALHLPKRLAIIHCPGHQKAKDPISRGNQMADRVAKQAAQGVNLLPMIETPKAP

SEQ ID NO: 349 - DNA, 2061 bp, synthetic construct
  misc_feature 1..2061: note = Engineered reverse transcriptase variants
  source 1..2061: mol_type = other DNA
atgcatcaccatcaccatcatggtggtagcggagtgctgacccttcagctggatgatgaatatcgcttgtacagtccgctggtcaaaccagaccaaaacattcagttctggctcgaacagtttccgcaagcgtgggctgaaactggtggcatgggcctggccaaacaggttcctcctcaggtaatcctgttaaaggcatctgccacgccggtgtcagttcgtcagtatccgctgtcgaaagaagcgcaagaggggattcgcccacacattcagcgtttgatccagcagggcattctggtaccggttcaaagcccctggaataccccgcttttaccagtccgtaaaccgggtacaaacgattaccgtcctgtgcaagacctgcgcgaagtcaataaacgtgtgcaggatatccacccaaccgttccgaacccgtataatctgttgtgcgcgttaccgccgcagcgttcctggtacacggtgctggacctgaaggacgcgttcttctgtcttcgcctccaccccaccagccagccactgtttgcctttgaatggcgcgatcctgatacgggccgtactgggcaattaacatggacccgtttgccgcagggctttaagaacagtcccgccatctttgatgaggctcttcaccgcgacctcgcaaatttccgcatccaacacccacaggtaacgttactccagtatgtcgatgatcttttgttagcgggtgccaccaaacaggactgcttggaaggaacgaaagcacttctcttggaactctcggatttaggttatcgtgtgtccgccaagaaagctcagatttgtcgccgcgaagtgacatacttaggctattcattgcgtgatggtcaacgttggcttactgaggcgcgcaagaagaccgttgttcaaatccccgcccctaagaccgcgaaacagatgcgtgaatttcttggcacggcaggtttttgccgtttgtggattcctggctttgctacgttagcggcacccctctatccactcacgaaagagaaaggagaattctcttgggccccagaacatcagaaagcgtttgacgccatcaagaaagcgttattaagcgctcctgctcttgcattgcccgatgtcaccaaaccattcacgctctacgtggatgaacgcaaaggcgtagcccgcggtgtgttgacacagaccttaggaccttggcgtcgtcccgtggcctacctctcgaagaaacttgacccagttgcaagtggttggcctgtctgcttgaaagctattgccgcagttgcaatcctcgtcaaagatgccgacaaacttactttgggccagaacctgactgttattgcaccacacgcccttgaaaacatcgttcgtcagccacctgatcgctggatgaccaatgctcgcatgacgcattatcagagcctcttgcttaccgaacgcgtgacttttgctccacctgcagccttaaaccccgcaacccttttacccgaagaaacagatgagcctgtgacgcatgactgtctgcaactcttgattgaagaaactggcgtacgcaaagacctcaccgatattccattaacaggtgaggtacttacgtggtttaccgaggggtcctcttatgtcgtcgaaggcaaacgtatggctggtgccgccgttgttgatggcacccgtactatctgggcaagcagcttacccgaaggcacgagtgctcagaaagcacaattgatggccttgacccaagccttacgccttgctgaagggaaatcgatcaatatttacaccgactcacgctatgcattcgccacggcacatgtacacggtgccatctacaaacaacgtggtttgttaacttctgctggccgcgagattaagaacaaagaagaaatcctttccttacttgaagccttacacctccccaaacgtctcgctattattcattgtccagggcatcagaaagcaaaagatcctatcagccgtgggaatcaaatggcagatcgtgtcgctaaacaggcagcccaaggcgttaacttgttgcccatgattgagacccctaaagctcca

SEQ ID NO: 350 - protein, 687 aa, synthetic construct
  REGION 1..687: note = Engineered reverse transcriptase variants
MHHHHHHGGSGVLTLQLDDEYRLYSPLVKPDQNIQFWLEQFPQAWAETGGMGLAKQVPPQVILLKASATPVSVRQYPLSKEAQEGIRPHIQRLIQQGILVPVQSPWNTPLLPVRKPGTNDYRPVQDLREVNKRVQDIHPTVPNPYNLLCALPPQRSWYTVLDLKDAFFCLRLHPTSQPLFAFEWRDPDTGRTGQLTWTRLPQGFKNSPAIFDEALHRDLANFRIQHPQVTLLQYVDDLLLAGATKQDCLEGTKALLLELSDLGYRVSAKKAQICRREVTYLGYSLRDGQRWLTEARKKTVVQIPAPKTAKQMREFLGTAGFCRLWIPGFATLAAPLYPLTKEKGEFSWAPEHQKAFDAIKKALLSAPALALPDVTKPFTLYVDERKGVARGVLTQTLGPWRRPVAYLSKKLDPVASGWPVCLKAIAAVAILVKDADKLTLGQNLTVIAPHALENIVRQPPDRWMTNARMTHYQSLLLTERVTFAPPAALNPATLLPEETDEPVTHDCLQLLIEETGVRKDLTDIPLTGEVLTWFTEGSSYVVEGKRMAGAAVVDGTRTIWASSLPEGTSAQKAQLMALTQALRLAEGKSINIYTDSRYAFATAHVHGAIYKQRGLLTSAGREIKNKEEILSLLEALHLPKRLAIIHCPGHQKAKDPISRGNQMADRVAKQAAQGVNLLPMIETPKAP

SEQ ID NO: 351 - DNA, 2061 bp, synthetic construct
  misc_feature 1..2061: note = Engineered reverse transcriptase variants
  source 1..2061: mol_type = other DNA
atgcatcaccatcaccatcatggtggtagcggagtgctgacccttcagctggatgatgaatatcgcttgtacagtccgctggtcaaaccagaccaaaacattcagttctggctcgaacagtttccgcaagcgtgggctgaaactggtggcatgggcctggccaaacaggttcctcctcaggtaatccagttaaaggcatctgccacgccggtgtcagttcgtcagtatccgctgtcgaaagaagcgcaagaggggattcgcccacacgtgcagcgtttgatccagcagggcattctggtaccggttcaaagcccctggaataccccgcttttaccagtccgcaaaccgggtacaaacgattaccgtcctgtgcaagacctgcgcgaagtcaataaacgtgtgcaggatatccacccaaccgttccgaacccgtataatctgttgtgcgcgttaccgccgcagcgttcctggtacacggtgctggacctgaaggacgcgttcttctgtcttcgcctccatcccaccagccagccactgtttgcctttgaatggcgcgatcctgatacgggccgtactgggcaattaacatggacccgtttgccgcagggctttaagaacagtcccacgatctttgatgaggctcttcaccgcgacctcgcaaatttccgcatccaacacccacaggtaacgttactccagtatgtcgatgatcttttgttagcgggtgccaccaaacaggactgcttggaaggaacgaaagcacttctcttggaactcagtgatttaggttatcgtgtgtccgccaagaaagctcagatttgtcgccgcgaagtgacatacttaggctattcattgcgtgatggtcaacgttggcttactgaggcgcgcaagcgtaccgtcgttcaaatccccgcccctaagaccgcgaaacagatgcgtgaatttcttggcacggcaggtttctgccgtttgtggattcctggctttgctacgttagcggcacccctctatccactcacgaaagagaaaggagaattctcttgggccccagaacatcagaaagcgtttgacgccatcaagaaagcgttattaagcgctcctgctcttgcattgcccgatgtcaccaaaccattcacgctctacgtggatgaacgcaaaggcgtagcccgcggtgtgttgacacagaccttaggaccttggcgtcgtcccgtggcctacctctcgaagaaacttgacccagttgcaagtggttggcctgtctgcttgaaagctattgccgcagttgcaatcctcgtcaaagatgccgacaaacttactttgggccagaacctgactgttattgcaccacacgcccttgaaaacatcgttcgtcagccacctgatcgctggatgaccaatgctcgcatgacgcattatcagagcctcttgcttaccgaacgcgtgacttttgctccacctgcagccttaaaccccgcaacccttttacccgaagaaacagatgagcctgtgacgcatgactgtcatgaactcttgattgaagaaactggcgtacgcaaggacctcaccgatattccattaacaggtgaggtacttacgtggtttaccgaggggtcctcttatgtcgtcgaaggcaaacgtatggctggtgccgccgttgttgatggcacccgtactatctgggcaagcagcttacccgaaggcacgagtgctcagaaagcagagttgatggccttgacccaagccttacgccttgctgaagggaaatcgatcaatatttacaccgattcacgctatgcattcgccacggcacatgtacacggtgccatctacaaacaacgtggtttgttaacttctgctggccgcgagattaagaacaaagaagaaatcctttccttacttgaagccttacacctccccaaacgtctcgctattattcattgtccagggcatcagaaagcaaaagatcctatcagccgtgggaatcaaatggcagatcgtgtcgctaaacaggcagcccaaggcgttaacttgttgcccatgattgagacccctaaagctcca

SEQ ID NO: 352 - protein, 687 aa, synthetic construct
  REGION 1..687: note = Engineered reverse transcriptase variants
MHHHHHHGGSGVLTLQLDDEYRLYSPLVKPDQNIQFWLEQFPQAWAETGGMGLAKQVPPQVIQLKASATPVSVRQYPLSKEAQEGIRPHVQRLIQQGILVPVQSPWNTPLLPVRKPGTNDYRPVQDLREVNKRVQDIHPTVPNPYNLLCALPPQRSWYTVLDLKDAFFCLRLHPTSQPLFAFEWRDPDTGRTGQLTWTRLPQGFKNSPTIFDEALHRDLANFRIQHPQVTLLQYVDDLLLAGATKQDCLEGTKALLLELSDLGYRVSAKKAQICRREVTYLGYSLRDGQRWLTEARKRTVVQIPAPKTAKQMREFLGTAGFCRLWIPGFATLAAPLYPLTKEKGEFSWAPEHQKAFDAIKKALLSAPALALPDVTKPFTLYVDERKGVARGVLTQTLGPWRRPVAYLSKKLDPVASGWPVCLKAIAAVAILVKDADKLTLGQNLTVIAPHALENIVRQPPDRWMTNARMTHYQSLLLTERVTFAPPAALNPATLLPEETDEPVTHDCHELLIEETGVRKDLTDIPLTGEVLTWFTEGSSYVVEGKRMAGAAVVDGTRTIWASSLPEGTSAQKAELMALTQALRLAEGKSINIYTDSRYAFATAHVHGAIYKQRGLLTSAGREIKNKEEILSLLEALHLPKRLAIIHCPGHQKAKDPISRGNQMADRVAKQAAQGVNLLPMIETPKAP

SEQ ID NO: 353 - DNA, 2061 bp, synthetic construct
  misc_feature 1..2061: note = Engineered reverse transcriptase variants
  source 1..2061: mol_type = other DNA
atgcatcaccatcaccatcatggtggtagcggagtgctgacccttcagctggatgatgaatatcgcttgtacagtccgctggtcaaaccagaccaaaacattcagttctggctcgaacagtttccgcaagcgtgggctgaaactggtggcatgggcctggccaaacaggttcctcctcaggtaatcctgttaaaggcatctgccacgccggtgtcagttcgtcagtatccgctgtcgaaagaagcgcaagaggggattcgcccacacattcagcgtttgatccagcagggcattctggtaccggttcaaagcccctggaataccccgcttttaccagtccgtaaaccgggtacaaacgattaccgtcctgtgcaagacctgcgcgaagtcaataaacgtgtgcaggatatccacccaaccgttccgaacccgtataatctgttgtgcgcgttaccgccgcagcgttcctggtacacggtgctggacctgaaggacgcgttcttctgtcttcgcctccaccccaccagccagccactgtttgcctttgaatggcgcgatcctgatacgggccgtactgggcaattaacatggacccgtttgccgcagggctttaagaacagtcccaccatctttgatgaggctcttcaccgcgacctcgcaaatttccgcatccaacacccacaggtaacgttactccagtatgtcgatgatcttttgttagcgggtgccaccaaacaggactgcttggaaggaacgaaagcacttctcttggaactctcggatttaggttatcgtgtgtccgccaagaaagctcagatttgtcgccgcgaagtgacatacttaggctattcattgcgtgatggtcaacgttggcttactgaggcgcgcaagaaaaccgtcgttcaaatccccgcccctaagaccgcgaaacagatgcgtgaatttcttggcacggcaggtttttgccgtttgtggattcctggctttgctacgttagcggcacccctctatccactcacgaaagagaaaggagaattctcttgggccccagaacatcagaaagcgtttgacgccatcaagaaagcgttattaagcgctcctgctcttgcattgcccgatgtcaccaaaccattcacgctctacgtggatgaacgcaaaggcgtagcccgcggtgtgttgacacagaccttaggaccttggcgtcgtcccgtggcctacctctcgaagaaacttgacccagttgcaagtggttggcctgtctgcttgaaagctattgccgcagttgcaatcctcgtcaaagatgccgacaaacttactttgggccagaacatcactgttattgcaccacacgcccttgaaaacatcgttcgtcagccacctgatcgctggatgaccaatgctcgcatgacgcattatcagagcctcttgcttaccgaacgcgtgacttttgctccacctgcagccttaaaccccgcaacccttttacccgaagaaacagatgagcctgtgacgcatgactgtctggaactcttgattgaagaaactggcgtacgcaaagacctcaccgatattccattaacaggtgaggtacttacgtggtttaccgaggggtcctcttatgtcgtcgaaggcaaacgtatggctggtgccgccgttgttgatggcacccgtactatctgggcaagcagcttacccgaaggcacgagtgctcagaaagcacaattgatggccttgacccaagccttacgccttgctgaagggaaatcgatcaatatttacaccaattcacgctatgcattcgccacggcacatgtacacggtgccatctacaaacaacgtggtttgttaacttctgctggccgcgagattaagaacaaagaagaaatcctttccttacttgaagccttacacctccccaaacgtctcgctattattcattgtccagggcatcagaaagcaaaagatcctatcagccgtgggaatcaaatggcagatcgtgtcgctaaacaggcagcccaaggcgttaacttgttgcccatgattgagacccctaaagctcca

SEQ ID NO: 354 - protein, 687 aa, synthetic construct
  REGION 1..687: note = Engineered reverse transcriptase variants
MHHHHHHGGSGVLTLQLDDEYRLYSPLVKPDQNIQFWLEQFPQAWAETGGMGLAKQVPPQVILLKASATPVSVRQYPLSKEAQEGIRPHIQRLIQQGILVPVQSPWNTPLLPVRKPGTNDYRPVQDLREVNKRVQDIHPTVPNPYNLLCALPPQRSWYTVLDLKDAFFCLRLHPTSQPLFAFEWRDPDTGRTGQLTWTRLPQGFKNSPTIFDEALHRDLANFRIQHPQVTLLQYVDDLLLAGATKQDCLEGTKALLLELSDLGYRVSAKKAQICRREVTYLGYSLRDGQRWLTEARKKTVVQIPAPKTAKQMREFLGTAGFCRLWIPGFATLAAPLYPLTKEKGEFSWAPEHQKAFDAIKKALLSAPALALPDVTKPFTLYVDERKGVARGVLTQTLGPWRRPVAYLSKKLDPVASGWPVCLKAIAAVAILVKDADKLTLGQNITVIAPHALENIVRQPPDRWMTNARMTHYQSLLLTERVTFAPPAALNPATLLPEETDEPVTHDCLELLIEETGVRKDLTDIPLTGEVLTWFTEGSSYVVEGKRMAGAAVVDGTRTIWASSLPEGTSAQKAQLMALTQALRLAEGKSINIYTNSRYAFATAHVHGAIYKQRGLLTSAGREIKNKEEILSLLEALHLPKRLAIIHCPGHQKAKDPISRGNQMADRVAKQAAQGVNLLPMIETPKAP

SEQ ID NO: 355 - DNA, 2061 bp, synthetic construct
  misc_feature 1..2061: note = Engineered reverse transcriptase variants
  source 1..2061: mol_type = other DNA
atgcatcaccatcaccatcatggtggtagcggagtgctgacccttcagctggatgatgaatatcgcttgtacagtccgctggtcaaaccagaccaaaacattcagttctggctcgaacagtttccgcaagcgtgggctgaaactggtggcatgggcctggccaaacaggttcctcctcaggtaatccaattaaaggcatctgccacgccggtgtcagttcgtcagtatccgctgtcgaaagaagcgagggaggggattcgcccacacgtgcagcgtttgatccagcagggcattctggtaccggttcaaagcccctggaataccccgcttttaccagtccgcaaaccgggtacaaacgattaccgtcctgtgcaagacctgcgcgaagtcaataaacgtgtgcaggatatccacccaaccgttccgaacccgtataatctgttgtgcgcgttaccgccgcagcgttcctggtacacggtgctggacctgaaggacgcgttcttctgtcttcgcctccatcccaccagccagccactgtttgcctttgaatggcgcgatcctgatacgggccgtactgggcaattaacatggacccgtttgccgcagggctttaagaacagtcccacgatctttgatgaggctcttcaccgcgacctcgcaaatttccgcatccaacacccacaggtaacgttactccagtatgtcgatgatcttttgttagcgggtgccaccaaacaggactgcttggaaggaacgaaagcacttctcttggaactctcggatttaggttatcgtgtgtccgccaagaaagctcagatttgtcgccgcgaagtgacatacttaggctattcattgcgtgatggtcaacgttggcttactgaggcgcgcaagaagaccgttgttcaaatccccgcccctaagaccgcgaaacagatgcgtgaatttcttggcacggcaggtttctgccgtttgtggattcctggctttgctacgttagcggcacccctctatccactcacgaaagagaaaggagaattctcttgggccccagaacatcagaaagcgtttgacgccatcaagaaagcgttattaagcgctcctgctcttgcattgcccgatgtcaccaaaccattcacgctctacgtggatgaacgcaaaggcgtagcccgcggtgtgttgacacagaccttaggaccttggcgtcgtcccgtggcctacctctcgaagaaacttgacccagttgcaagtggttggcctgtctgcttgaaagctattgccgcagttgcaatcctcgtcaaagatgccgacaaacttactttgggccagaacattactgttattgcaccacacgcccttgaaaacatcgttcgtcagccacctgatcgctggatgaccaatgctcgcatgacgcattatcagagcctcttgcttaccgaacgcgtgacttttgctccacctgcagccttaaaccccgcaacccttttacccgaagaaacagatgagcctgtgacgcatgactgtcaccagctcttgattgaagaaactggcgtacgcaaagacctcaccgatattccattaacaggtgaggtacttacgtggtttaccgaggggtcctcttatgtcgtcgaaggcaaacgtatggctggtgccgccgttgttgatggcacccgtactatctgggcaagcagcttacccgaaggcacgagtgctcagaaagcagagttgatggccttgacccaagccttacgccttgctgaagggaaatcgatcaatatttacaccgactcacgctatgcattcgccacggcacatgtacacggtgccatctacaaacaacgtggtttgttaacttctgctggccgcgagattaagaacaaagaagaaatcctttccttacttgaagccttacacctccccaaacgtctcgctattattcattgtccagggcatcagaaagcaaaagatcctatcagccgtgggaatcaaatggcagatcgtgtcgctaaacaggcagcccaaggcgttaacttgttgcccatgattgagacccctaaagctcca

SEQ ID NO: 356 - protein, 687 aa, synthetic construct
  REGION 1..687: note = Engineered reverse transcriptase variants
MHHHHHHGGSGVLTLQLDDEYRLYSPLVKPDQNIQFWLEQFPQAWAETGGMGLAKQVPPQVIQLKASATPVSVRQYPLSKEAREGIRPHVQRLIQQGILVPVQSPWNTPLLPVRKPGTNDYRPVQDLREVNKRVQDIHPTVPNPYNLLCALPPQRSWYTVLDLKDAFFCLRLHPTSQPLFAFEWRDPDTGRTGQLTWTRLPQGFKNSPTIFDEALHRDLANFRIQHPQVTLLQYVDDLLLAGATKQDCLEGTKALLLELSDLGYRVSAKKAQICRREVTYLGYSLRDGQRWLTEARKKTVVQIPAPKTAKQMREFLGTAGFCRLWIPGFATLAAPLYPLTKEKGEFSWAPEHQKAFDAIKKALLSAPALALPDVTKPFTLYVDERKGVARGVLTQTLGPWRRPVAYLSKKLDPVASGWPVCLKAIAAVAILVKDADKLTLGQNITVIAPHALENIVRQPPDRWMTNARMTHYQSLLLTERVTFAPPAALNPATLLPEETDEPVTHDCHQLLIEETGVRKDLTDIPLTGEVLTWFTEGSSYVVEGKRMAGAAVVDGTRTIWASSLPEGTSAQKAELMALTQALRLAEGKSINIYTDSRYAFATAHVHGAIYKQRGLLTSAGREIKNKEEILSLLEALHLPKRLAIIHCPGHQKAKDPISRGNQMADRVAKQAAQGVNLLPMIETPKAP

SEQ ID NO: 357 - DNA, 2061 bp, synthetic construct
  misc_feature 1..2061: note = Engineered reverse transcriptase variants
  source 1..2061: mol_type = other DNA
atgcatcaccatcaccatcatggtggtagcggagtgctgacccttcagctggatgatgaatatcgcttgtacagtccgctggtcaaaccagaccaaaacattcagttctggctcgaacagtttccgcaagcgtgggctgaaactggtggcatgggcctggccaaacaggttcctcctcaggtaatccaattaaaggcatctgccacgccggtgtcagttcgtcagtatccgctgtcgaaagaagcgcaagaggggattcgcccacacgtgcagcgtttgatccagcagggcattctggtaccggttcaaagcccctggaataccccgcttttaccagtccgcaaaccgggtacaaacgattaccgtcctgtgcaagacctgcgcgaagtcaataaacgtgtgcaggatatccacccaaccgttccgaacccgtataatctgttgtgcgcgttaccgccgcagcgttcctggtacacggtgctggacctgaaggacgcgttcttctgtcttcgcctccatcccaccagccagccactgtttgcctttgaatggcgcgatcctgatacgggccgtactgggcaattaacatggacccgtttgccgcagggctttaagaacagtcccacgatctttgatgaggctcttcaccgcgacctcgcaaatttccgcatccaacacccacaggtaacgttactccagtatgtcgatgatcttttgttagcgggtgccaccaaacaggactgcttggaaggaacgaaagcacttctcttggaactctcggatttaggttatcgtgtgtccgccaagaaagctcagatttgtcgccgcgaagtgacatacttaggctattcattgcgtgatggtcaacgttggcttactgaggcgcgcaagaagaccgttgttcaaatccccgcccctaagaccgcgaaagctatgcgtgaatttcttggcacggcaggtttctgccgtttgtggattcctggctttgctacgttagcggcacccctctatccactcacgaaagagaaaggagaattctcttgggccccagaacatcagaaagcgtttgacgccatcaagaaagcgttattaagcgctcctgctcttgcattgcccgatgtcaccaaaccattcacgctctacgtggatgaacgcaaaggcgtagcccgcggtgtgttgacacagaccttaggaccttggcgtcgtcccgtggcctacctctcgaagaaacttgacccagttgcaagtggttggcctgtctgcttgaaagctattgccgcagttgcaatcctcgtcaaagatgccgacaaacttactttgggccagaacattactgttattgcaccacacgcccttgaaaacatcgttcgtcagccacctgatcgctggatgaccaatgctcgcatgacgcattatcagagcctcttgcttaccgaacgcgtgacttttgctccacctgcagccttaaaccccgcaacccttttacccgaagaaacagatgagcctgtgacgcatgactgtcaccagctcttgattgaagaaactggcgtacgcaaagacctcaccgatattccattaacaggtgaggtacttacgtggtttaccgaggggtcctcttatgtcgtcgaaggcaaacgtatggctggtgccgccgttgttgatggcacccgtactatctgggcaagcagcttacccgaaggcacgagtgctcagaaagcagagttgatggccttgacccaagccttacgccttgctgaagggaaatcgatcaatatttacaccgactcacgctatgcattcgccacggcacatgtacacggtgccatctacaaacaacgtggtttgttaacttctgctggccgcgagattaagaacaaagaagaaatcctttccttacttgaagccttacacctccccaaacgtctcgctattattcattgtccagggcatcagaaagcaaaagatcctatcagccgtgggaatcaaatggcagatcgtgtcgctaaacaggcagcccaaggcgttaacttgttgcccatgattgagacccctaaagctcca

SEQ ID NO: 358 - protein, 687 aa, synthetic construct
  REGION 1..687: note = Engineered reverse transcriptase variants
MHHHHHHGGSGVLTLQLDDEYRLYSPLVKPDQNIQFWLEQFPQAWAETGGMGLAKQVPPQVIQLKASATPVSVRQYPLSKEAQEGIRPHVQRLIQQGILVPVQSPWNTPLLPVRKPGTNDYRPVQDLREVNKRVQDIHPTVPNPYNLLCALPPQRSWYTVLDLKDAFFCLRLHPTSQPLFAFEWRDPDTGRTGQLTWTRLPQGFKNSPTIFDEALHRDLANFRIQHPQVTLLQYVDDLLLAGATKQDCLEGTKALLLELSDLGYRVSAKKAQICRREVTYLGYSLRDGQRWLTEARKKTVVQIPAPKTAKAMREFLGTAGFCRLWIPGFATLAAPLYPLTKEKGEFSWAPEHQKAFDAIKKALLSAPALALPDVTKPFTLYVDERKGVARGVLTQTLGPWRRPVAYLSKKLDPVASGWPVCLKAIAAVAILVKDADKLTLGQNITVIAPHALENIVRQPPDRWMTNARMTHYQSLLLTERVTFAPPAALNPATLLPEETDEPVTHDCHQLLIEETGVRKDLTDIPLTGEVLTWFTEGSSYVVEGKRMAGAAVVDGTRTIWASSLPEGTSAQKAELMALTQALRLAEGKSINIYTDSRYAFATAHVHGAIYKQRGLLTSAGREIKNKEEILSLLEALHLPKRLAIIHCPGHQKAKDPISRGNQMADRVAKQAAQGVNLLPMIETPKAP

SEQ ID NO: 359 - DNA, 2061 bp, synthetic construct
  misc_feature 1..2061: note = Engineered reverse transcriptase variants
  source 1..2061: mol_type = other DNA
atgcatcaccatcaccatcatggtggtagcggagtgctgacccttcagctggatgatgaatatcgcttgtacagtccgctggtcaaaccagaccaaaacattcagttctggctcgaacagtttccgcaagcgtgggctgaaactggtggcatgggcctggccaaacaggttcctcctcaggtaatccaattaaaggcatctgccacgccggtgtcagttcgtcagtatccgctgtcgaaagaagcgcaagaggggattcgcccaatggtgcagcgtttgatccagcagggcattctggtaccggttcaaagcccctggaataccccgcttttaccagtccgcaaaccgggtacaaacgattaccgtcctgtgcaagacctgcgcgaagtcaataaacgtgtgcaggatatccacccaaccgttccgaacccgtataatctgttgtgcgcgttaccgccgcagcgttcctggtacacggtgctggacctgaaggacgcgttcttctgtcttcgcctccatcccaccagccagccactgtttgcctttgaatggcgcgatcctgatacgggccgtactgggcaattaacatggacccgtttgccgcagggctttaagaacagtcccacgatctttgatgaggctcttcaccgcgacctcgcaaatttccgcatccaacacccacaggtaacgttactccagtatgtcgatgatcttttgttagcgggtgccaccaaacaggactgcttggaaggaacgaaagcacttctcttggaactctcggatttaggttatcgtgtgtccgccaagaaagctcagatttgtcgccgcgaagtgacatacttaggctattcattgcgtgatggtcaacgttggcttactgaggcgcgcaagaagaccgttgttcaaatccccgcccctaagaccgcgaaacagatgcgtgaatttcttggcacggcaggtttctgccgtttgtggattcctggctttgctacgttagcggcacccctctatccactcacgaaagagaaaggagaattctcttgggccccagaacatcagaaagcgtttgacgccatcaagaaagcgttattaagcgctcctgctcttgcattgcccgatgtcaccaaaccattcacgctctacgtggatgaacgcaaaggcgtagcccgcggtgtgttgacacagaccttaggaccttggcgtcgtcccgtggcctacctctcgaagaaacttgacccagttgcaagtggttggcctgtctgcttgaaagctattgccgcagttgcaatcctcgtcaaagatgccgacaaacttactttgggccagaacattactgttattgcaccacacgcccttgaaaacatcgttcgtcagccacctgatcgctggatgaccaatgctcgcatgacgcattatcagagcctcttgcttaccgaacgcgtgacttttgctccacctgcagccttaaaccccgcaacccttttacccgaagaaacagatgagcctgtgacgcatgactgtcaccagctcttgattgaagaaactggcgtacgcaaagacctcaccgatattccattaacaggtgaggtacttacgtggtttaccgaggggtcctcttatgtcgtcgaaggcaaacgtatggctggtgccgccgttgttgatggcacccgtactatctgggcaagcagcttacccgaaggcacgagtgctcagaaagcagagttgatggccttgacccaagccttacgccttgctgaagggaaatcgatcaatatttacaccgactcacgctatgcattcgccacggcacatgtacacggtgccatctacaaacaacgtggtttgttaacttctgctggccgcgagattaagaacaaagaagaaatcctttccttacttgaagccttacacctccccaaacgtctcgctattattcattgtccagggcatcagaaagcaaaagatcctatcagccgtgggaatcaaatggcagatcgtgtcgctaaacaggcagcccaaggcgttaacttgttgcccatgattgagacccctaaagctcca

SEQ ID NO: 360 - protein, 687 aa, synthetic construct
  REGION 1..687: note = Engineered reverse transcriptase variants
MHHHHHHGGSGVLTLQLDDEYRLYSPLVKPDQNIQFWLEQFPQAWAETGGMGLAKQVPPQVIQLKASATPVSVRQYPLSKEAQEGIRPMVQRLIQQGILVPVQSPWNTPLLPVRKPGTNDYRPVQDLREVNKRVQDIHPTVPNPYNLLCALPPQRSWYTVLDLKDAFFCLRLHPTSQPLFAFEWRDPDTGRTGQLTWTRLPQGFKNSPTIFDEALHRDLANFRIQHPQVTLLQYVDDLLLAGATKQDCLEGTKALLLELSDLGYRVSAKKAQICRREVTYLGYSLRDGQRWLTEARKKTVVQIPAPKTAKQMREFLGTAGFCRLWIPGFATLAAPLYPLTKEKGEFSWAPEHQKAFDAIKKALLSAPALALPDVTKPFTLYVDERKGVARGVLTQTLGPWRRPVAYLSKKLDPVASGWPVCLKAIAAVAILVKDADKLTLGQNITVIAPHALENIVRQPPDRWMTNARMTHYQSLLLTERVTFAPPAALNPATLLPEETDEPVTHDCHQLLIEETGVRKDLTDIPLTGEVLTWFTEGSSYVVEGKRMAGAAVVDGTRTIWASSLPEGTSAQKAELMALTQALRLAEGKSINIYTDSRYAFATAHVHGAIYKQRGLLTSAGREIKNKEEILSLLEALHLPKRLAIIHCPGHQKAKDPISRGNQMADRVAKQAAQGVNLLPMIETPKAP

SEQ ID NO: 361 - DNA, 2061 bp, synthetic construct
  misc_feature 1..2061: note = Engineered reverse transcriptase variants
  source 1..2061: mol_type = other DNA
atgcatcaccatcaccatcatggtggtagcggagtgctgacccttcagctggatgatgaatatcgcttgtacagtccgctggtcaaaccagaccaaaacattcagttctggctcgaacagtttccgcaagcgtgggctgaaactggtggcatgggcctggccaaacaggttcctcctcaggtaatccaattaaaggcatctgccacgccggtgtcagttcgtcagtatccgctgtcgaaagaagcgcaagaggggattcgcccacacgtgcagcgtttgatccagcagggcattctggtaccggttcaaagcccctggaataccccgcttttaccagtccgcaaaccgggtacaaacgattaccgtcctgtgcaagacctgcgcgaaaggaataaacgtgtgcaggatatccacccaaccgttccgaacccgtataatctgttgtgcgcgttaccgccgcagcgttcctggtacacggtgctggacctgaaggacgcgttcttctgtcttcgcctccatcccaccagccagccactgtttgcctttgaatggcgcgatcctgatacgggccgtactgggcaattaacatggacccgtttgccgcagggctttaagaacagtcccacgatctttgatgaggctcttcaccgcgacctcgcaaatttccgcatccaacacccacaggtaacgttactccagtatgtcgatgatcttttgttagcgggtgccaccaaacaggactgcttggaaggaacgaaagcacttctcttggaactctcggatttaggttatcgtgtgtccgccaagaaagctcagatttgtcgccgcgaagtgacatacttaggctattcattgcgtgatggtcaacgttggcttactgaggcgcgcaagaagaccgttgttcaaatccccgcccctaagaccgcgaaacagatgcgtgaatttcttggcacggcaggtttctgccgtttgtggattcctggctttgctacgttagcggcacccctctatccactcacgaaagagaaaggagaattctcttgggccccagaacatcagaaagcgtttgacgccatcaagaaagcgttattaagcgctcctgctcttgcattgcccgatgtcaccaaaccattcacgctctacgtggatgaacgcaaaggcgtagcccgcggtgtgttgacacagaccttaggaccttggcgtcgtcccgtggcctacctctcgaagaaacttgacccagttgcaagtggttggcctgtctgcttgaaagctattgccgcagttgcaatcctcgtcaaagatgccgacaaacttactttgggccagaacattactgttattgcaccacacgcccttgaaaacatcgttcgtcagccacctgatcgctggatgaccaatgctcgcatgacgcattatcagagcctcttgcttaccgaacgcgtgacttttgctccacctgcagccttaaaccccgcaacccttttacccgaagaaacagatgagcctgtgacgcatgactgtcaccagctcttgattgaagaaactggcgtacgcaaagacctcaccgatattccattaacaggtgaggtacttacgtggtttaccgaggggtcctcttatgtcgtcgaaggcaaacgtatggctggtgccgccgttgttgatggcacccgtactatctgggcaagcagcttacccgaaggcacgagtgctcagaaagcagagttgatggccttgacccaagccttacgccttgctgaagggaaatcgatcaatatttacaccgactcacgctatgcattcgccacggcacatgtacacggtgccatctacaaacaacgtggtttgttaacttctgctggccgcgagattaagaacaaagaagaaatcctttccttacttgaagccttacacctccccaaacgtctcgctattattcattgtccagggcatcagaaagcaaaagatcctatcagccgtgggaatcaaatggcagatcgtgtcgctaaacaggcagcccaaggcgttaacttgttgcccatgattgagacccctaaagctcca

SEQ ID NO: 362 - protein, 687 aa, synthetic construct
  REGION 1..687: note = Engineered reverse transcriptase variants
MHHHHHHGGSGVLTLQLDDEYRLYSPLVKPDQNIQFWLEQFPQAWAETGGMGLAKQVPPQVIQLKASATPVSVRQYPLSKEAQEGIRPHVQRLIQQGILVPVQSPWNTPLLPVRKPGTNDYRPVQDLRERNKRVQDIHPTVPNPYNLLCALPPQRSWYTVLDLKDAFFCLRLHPTSQPLFAFEWRDPDTGRTGQLTWTRLPQGFKNSPTIFDEALHRDLANFRIQHPQVTLLQYVDDLLLAGATKQDCLEGTKALLLELSDLGYRVSAKKAQICRREVTYLGYSLRDGQRWLTEARKKTVVQIPAPKTAKQMREFLGTAGFCRLWIPGFATLAAPLYPLTKEKGEFSWAPEHQKAFDAIKKALLSAPALALPDVTKPFTLYVDERKGVARGVLTQTLGPWRRPVAYLSKKLDPVASGWPVCLKAIAAVAILVKDADKLTLGQNITVIAPHALENIVRQPPDRWMTNARMTHYQSLLLTERVTFAPPAALNPATLLPEETDEPVTHDCHQLLIEETGVRKDLTDIPLTGEVLTWFTEGSSYVVEGKRMAGAAVVDGTRTIWASSLPEGTSAQKAELMALTQALRLAEGKSINIYTDSRYAFATAHVHGAIYKQRGLLTSAGREIKNKEEILSLLEALHLPKRLAIIHCPGHQKAKDPISRGNQMADRVAKQAAQGVNLLPMIETPKAP

SEQ ID NO: 363 - DNA, 2061 bp, synthetic construct
  misc_feature 1..2061: note = Engineered reverse transcriptase variants
  source 1..2061: mol_type = other DNA
atgcatcaccatcaccatcatggtggtagcggagtgctgacccttcagctggatgatgaatatcgcttgtacagtccgctggtcaaaccagaccaaaacattcagttctggctcgaacagtttccgcaagcgtgggctgaaactggtggcatgggcctggccaaacaggttcctcctcaggtaatccaattaaaggcatctgccacgccggtgtcagttcgtcagtatccgctgtcgaaagaagcgcaagaggggattcgcccacacgtgcagcgtttgatccagcagggcattctggtaccggttcaaagcccctggaataccccgcttttaccagtccgcaaaccgggtacaaacgattaccgtcctgtgcaagacctgcgcgaagtcaataaacgtgtgcaggatatccacccaaccgttccgaacccgtataatctgttgtgcgcgttaccgccgcagcgttcctggtacacggtgctggacctgaaggacgcgttcttctgtcttcgcctccatcccaccagccagttgctgtttgcctttgaatggcgcgatcctgatacgggccgtactgggcaattaacatggacccgtttgccgcagggctttaagaacagtcccacgatctttgatgaggctcttcaccgcgacctcgcaaatttccgcatccaacacccacaggtaacgttactccagtatgtcgatgatcttttgttagcgggtgccaccaaacaggactgcttggaaggaacgaaagcacttctcttggaactctcggatttaggttatcgtgtgtccgccaagaaagctcagatttgtcgccgcgaagtgacatacttaggctattcattgcgtgatggtcaacgttggcttactgaggcgcgcaagaagaccgttgttcaaatccccgcccctaagaccgcgaaacagatgcgtgaatttcttggcacggcaggtttctgccgtttgtggattcctggctttgctacgttagcggcacccctctatccactcacgaaagagaaaggagaattctcttgggccccagaacatcagaaagcgtttgacgccatcaagaaagcgttattaagcgctcctgctcttgcattgcccgatgtcaccaaaccattcacgctctacgtggatgaacgcaaaggcgtagcccgcggtgtgttgacacagaccttaggaccttggcgtcgtcccgtggcctacctctcgaagaaacttgacccagttgcaagtggttggcctgtctgcttgaaagctattgccgcagttgcaatcctcgtcaaagatgccgacaaacttactttgggccagaacattactgttattgcaccacacgcccttgaaaacatcgttcgtcagccacctgatcgctggatgaccaatgctcgcatgacgcattatcagagcctcttgcttaccgaacgcgtgacttttgctccacctgcagccttaaaccccgcaacccttttacccgaagaaacagatgagcctgtgacgcatgactgtcaccagctcttgattgaagaaactggcgtacgcaaagacctcaccgatattccattaacaggtgaggtacttacgtggtttaccgaggggtcctcttatgtcgtcgaaggcaaacgtatggctggtgccgccgttgttgatggcacccgtactatctgggcaagcagcttacccgaaggcacgagtgctcagaaagcagagttgatggccttgacccaagccttacgccttgctgaagggaaatcgatcaatatttacaccgactcacgctatgcattcgccacggcacatgtacacggtgccatctacaaacaacgtggtttgttaacttctgctggccgcgagattaagaacaaagaagaaatcctttccttacttgaagccttacacctccccaaacgtctcgctattattcattgtccagggcatcagaaagcaaaagatcctatcagccgtgggaatcaaatggcagatcgtgtcgctaaacaggcagcccaaggcgttaacttgttgcccatgattgagacccctaaagctcca

SEQ ID NO: 364 - protein, 687 aa, synthetic construct
  REGION 1..687: note = Engineered reverse transcriptase variants
MHHHHHHGGSGVLTLQLDDEYRLYSPLVKPDQNIQFWLEQFPQAWAETGGMGLAKQVPPQVIQLKASATPVSVRQYPLSKEAQEGIRPHVQRLIQQGILVPVQSPWNTPLLPVRKPGTNDYRPVQDLREVNKRVQDIHPTVPNPYNLLCALPPQRSWYTVLDLKDAFFCLRLHPTSQLLFAFEWRDPDTGRTGQLTWTRLPQGFKNSPTIFDEALHRDLANFRIQHPQVTLLQYVDDLLLAGATKQDCLEGTKALLLELSDLGYRVSAKKAQICRREVTYLGYSLRDGQRWLTEARKKTVVQIPAPKTAKQMREFLGTAGFCRLWIPGFATLAAPLYPLTKEKGEFSWAPEHQKAFDAIKKALLSAPALALPDVTKPFTLYVDERKGVARGVLTQTLGPWRRPVAYLSKKLDPVASGWPVCLKAIAAVAILVKDADKLTLGQNITVIAPHALENIVRQPPDRWMTNARMTHYQSLLLTERVTFAPPAALNPATLLPEETDEPVTHDCHQLLIEETGVRKDLTDIPLTGEVLTWFTEGSSYVVEGKRMAGAAVVDGTRTIWASSLPEGTSAQKAELMALTQALRLAEGKSINIYTDSRYAFATAHVHGAIYKQRGLLTSAGREIKNKEEILSLLEALHLPKRLAIIHCPGHQKAKDPISRGNQMADRVAKQAAQGVNLLPMIETPKAP

SEQ ID NO: 365 - DNA, 2061 bp, synthetic construct
  misc_feature 1..2061: note = Engineered reverse transcriptase variants
  source 1..2061: mol_type = other DNA
atgcatcaccatcaccatcatggtggtagcggagtgctgacccttcagctggatgatgaatatcgcttgtacagtccgctggtcaaaccagaccaaaacattcagttctggctcgaacagtttccgcaagcgtgggctgaaactggtggcatgggcctggccaaacaggttcctcctcaggtaatccaattaaaggcatctgccacgccggtgtcagttcgtcagtatccgctgtcgaaagaagcgcaagaggggattcgcccacacgtgcagcgtttgatccagcagggcattctggtaccggttcaaagcccctggaataccccgcttttaccagtccgcaaaccgggtcgtaacgattaccgtcctgtgcaagacctgcgcgaagtcaataaacgtgtgcaggatatccacccaaccgttccgaacccgtataatctgttgtgcgcgttaccgccgcagcgttcctggtacacggtgctggacctgaaggacgcgttcttctgtcttcgcctccatcccaccagccagccactgtttgcctttgaatggcgcgatcctgatacgggccgtactgggcaattaacatggacccgtttgccgcagggctttaagaacagtcccacgatctttgatgaggctcttcaccgcgacctcgcaaatttccgcatccaacacccacaggtaacgttactccagtatgtcgatgatcttttgttagcgggtgccaccaaacaggactgcttggaaggaacgaaagcacttctcttggaactctcggatttaggttatcgtgtgtccgccaagaaagctcagatttgtcgccgcgaagtgacatacttaggctattcattgcgtgatggtcaacgttggcttactgaggcgcgcaagaagaccgttgttcaaatccccgcccctaagaccgcgaaacagatgcgtgaatttcttggcacggcaggtttctgccgtttgtggattcctggctttgctacgttagcggcacccctctatccactcacgaaagagaaaggagaattctcttgggccccagaacatcagaaagcgtttgacgccatcaagaaagcgttattaagcgctcctgctcttgcattgcccgatgtcaccaaaccattcacgctctacgtggatgaacgcaaaggcgtagcccgcggtgtgttgacacagaccttaggaccttggcgtcgtcccgtggcctacctctcgaagaaacttgacccagttgcaagtggttggcctgtctgcttgaaagctattgccgcagttgcaatcctcgtcaaagatgccgacaaacttactttgggccagaacattactgttattgcaccacacgcccttgaaaacatcgttcgtcagccacctgatcgctggatgaccaatgctcgcatgacgcattatcagagcctcttgcttaccgaacgcgtgacttttgctccacctgcagccttaaaccccgcaacccttttacccgaagaaacagatgagcctgtgacgcatgactgtcaccagctcttgattgaagaaactggcgtacgcaaagacctcaccgatattccattaacaggtgaggtacttacgtggtttaccgaggggtcctcttatgtcgtcgaaggcaaacgtatggctggtgccgccgttgttgatggcacccgtactatctgggcaagcagcttacccgaaggcacgagtgctcagaaagcagagttgatggccttgacccaagccttacgccttgctgaagggaaatcgatcaatatttacaccgactcacgctatgcattcgccacggcacatgtacacggtgccatctacaaacaacgtggtttgttaacttctgctggccgcgagattaagaacaaagaagaaatcctttccttacttgaagccttacacctccccaaacgtctcgctattattcattgtccagggcatcagaaagcaaaagatcctatcagccgtgggaatcaaatggcagatcgtgtcgctaaacaggcagcccaaggcgttaacttgttgcccatgattgagacccctaaagctcca

SEQ ID NO: 366 - protein, 687 aa, synthetic construct
  REGION 1..687: note = Engineered reverse transcriptase variants
MHHHHHHGGSGVLTLQLDDEYRLYSPLVKPDQNIQFWLEQFPQAWAETGGMGLAKQVPPQVIQLKASATPVSVRQYPLSKEAQEGIRPHVQRLIQQGILVPVQSPWNTPLLPVRKPGRNDYRPVQDLREVNKRVQDIHPTVPNPYNLLCALPPQRSWYTVLDLKDAFFCLRLHPTSQPLFAFEWRDPDTGRTGQLTWTRLPQGFKNSPTIFDEALHRDLANFRIQHPQVTLLQYVDDLLLAGATKQDCLEGTKALLLELSDLGYRVSAKKAQICRREVTYLGYSLRDGQRWLTEARKKTVVQIPAPKTAKQMREFLGTAGFCRLWIPGFATLAAPLYPLTKEKGEFSWAPEHQKAFDAIKKALLSAPALALPDVTKPFTLYVDERKGVARGVLTQTLGPWRRPVAYLSKKLDPVASGWPVCLKAIAAVAILVKDADKLTLGQNITVIAPHALENIVRQPPDRWMTNARMTHYQSLLLTERVTFAPPAALNPATLLPEETDEPVTHDCHQLLIEETGVRKDLTDIPLTGEVLTWFTEGSSYVVEGKRMAGAAVVDGTRTIWASSLPEGTSAQKAELMALTQALRLAEGKSINIYTDSRYAFATAHVHGAIYKQRGLLTSAGREIKNKEEILSLLEALHLPKRLAIIHCPGHQKAKDPISRGNQMADRVAKQAAQGVNLLPMIETPKAP

SEQ ID NO: 367 - DNA, 2061 bp, synthetic construct
  misc_feature 1..2061: note = Engineered reverse transcriptase variants
  source 1..2061: mol_type = other DNA
atgcatcaccatcaccatcatggtggtagcggagtgctgacccttcagctggatgatgaatatcgcttgtacagtccgctggtcaaaccagaccaaaacattcagttctggctcgaacagtttccgcaagcgtgggctgaaactggtggcatgggcctggccaaacaggttcctcctcaggtaatccagttaaaggcatctgccacgccggtgtcagttcgtcagtatccgctgtcgaaagaagcgcaggaggggattcgcccacacgtgcagcgtttgatccagcagggcattctggtaccggttcaaagcccctggaataccccgcttttaccagtccgcaaaccgggtacaaacgattaccgtcctgtgcaagacctgcgcgaagtcaataaacgtgtgcaggatatccacccaaccgttccgaacccgtataatctgttgtgcgcgttaccgccgcagcgttcctggtacacggtgctggacctgaaggacgcgttcttctgtcttcgcctccatcccaccagccagccactgtttgcctttgaatggcgcgatcctgatacgggccgtactgggcaattaacatggacccgtttgccgcagggctttaagaacagtcccacgatctttgatgaggctcttcaccgcgacctcgcaaatttccgcatccaacacccacaggtaacgttactccagtatgtcgatgatcttttgttagcgggtgccaccaaacaggactgcttggaaggaacgaaagcacttctcttggaactcagtgatttaggttatcgtgtgtccgccaagaaagctcagatttgtcgccgcgaagtgacatacttaggctattcattgcgtgatggtcaacgttggcttactgaggcgcgcaagcgtaccgtcgttcaaatccccgcccctaagactgaaaaacagatgcgtgaatttcttggcacggcaggtttctgccgtttgtggattcctggctttgctacgttagcggcacccctctatccactcacgaaatggaaaggagaattctcttgggccccagaacatcagaaagcgtttgacgccatcaagaaagcgttattaagcgctcctgctcttgcattgcccgatgtcaccaaaccattcacgctctacgtggatgaacgcaaaggcgtagcccgcggtgtgttgacacagaccttaggaccttggcgtcgtcccgtggcctacctctcgaagaaacttgacccagttgcaagtggttggcctgtctgcttgaaagctattgccgcagttgcaatcctcgtcaaagatgccgacaaacttactttgggccagaacctgactgttattgcaccacacgcccttgaaaacatcgttcgtcagccacctgatcgctggatgaccaatgctcgcatgacgcattatcagagcctcttgcttaccgaacgcgtgacttttgctccacctgcagccttaaaccccgcaacccttttacccgaagaaacagatgagcctgtgacgcatgactgtcatgaactcttgattgaagaaactggcgtacgcaaggacctcaccgatattccattaacaggtgaggtacttacgtggtttaccgaggggtcctcttatgtcgtcgaaggcaaacgtatggctggtgccgccgttgttgatggcacccgtactatctgggcaagcagcttacccgaaggcacgagtgctcagaaagcagagttgatggccttgacccaagccttacgccttgctgaagggaaatcgatcaatatttacaccgattcacgctatgcattcgccacggcacatgtacacggtgccatctacaaacaacgtggtttgttaacttctgctggccgcgagattaagaacaaagaagaaatcctttccttacttgaagccttacacctccccaaacgtctcgctattattcattgtccagggcatcagaaagcaaaagatcctatcagccgtgggaatcaaatggcagatcgtgtcgctaaacaggcagcccaaggcgttaacttgttgcccatgattgagacccctaaagctcca

SEQ ID NO: 368 - protein, 687 aa, synthetic construct
  REGION 1..687: note = Engineered reverse transcriptase variants
MHHHHHHGGSGVLTLQLDDEYRLYSPLVKPDQNIQFWLEQFPQAWAETGGMGLAKQVPPQVIQLKASATPVSVRQYPLSKEAQEGIRPHVQRLIQQGILVPVQSPWNTPLLPVRKPGTNDYRPVQDLREVNKRVQDIHPTVPNPYNLLCALPPQRSWYTVLDLKDAFFCLRLHPTSQPLFAFEWRDPDTGRTGQLTWTRLPQGFKNSPTIFDEALHRDLANFRIQHPQVTLLQYVDDLLLAGATKQDCLEGTKALLLELSDLGYRVSAKKAQICRREVTYLGYSLRDGQRWLTEARKRTVVQIPAPKTEKQMREFLGTAGFCRLWIPGFATLAAPLYPLTKWKGEFSWAPEHQKAFDAIKKALLSAPALALPDVTKPFTLYVDERKGVARGVLTQTLGPWRRPVAYLSKKLDPVASGWPVCLKAIAAVAILVKDADKLTLGQNLTVIAPHALENIVRQPPDRWMTNARMTHYQSLLLTERVTFAPPAALNPATLLPEETDEPVTHDCHELLIEETGVRKDLTDIPLTGEVLTWFTEGSSYVVEGKRMAGAAVVDGTRTIWASSLPEGTSAQKAELMALTQALRLAEGKSINIYTDSRYAFATAHVHGAIYKQRGLLTSAGREIKNKEEILSLLEALHLPKRLAIIHCPGHQKAKDPISRGNQMADRVAKQAAQGVNLLPMIETPKAP

SEQ ID NO: 369 - DNA, 2061 bp, synthetic construct
  misc_feature 1..2061: note = Engineered reverse transcriptase variants
  source 1..2061: mol_type = other DNA
atgcatcaccatcaccatcatggtggtagcggagtgctgacccttcagctggatgatgaatatcgcttgtacagtccgctggtcaaaccagaccaaaacattcagttctggctcgaacagtttccgcaagcgtgggctgaaactggtggcatgggcctggccaaacaggttcctcctcaggtaatccagttaaaggcatctgccacgccggtgtcagttcgtcagtatccgctgtcgaaagaagcgcaggaggggattcgcccacacgtgcagcgtttgatccagcagggcattctggtaccggttcaaagcccctggaataccccgcttttaccagtccgcaaaccgggtacaaacgattaccgtcctgtgcaagacctgcgcgaagtcaataaacgtgtgcaggatatccacccaaccgttccgaacccgtataatctgttgtgcgcgttaccgccgcagcgttcctggtacacggtgctggacctgaaggacgcgttcttctgtcttcgcctccatcccaccagccagccactgtttgcctttgaatggcgcgatcctgatacgggccgtactgggcaattaacatggacccgtttgccgcagggctttaagaacagtcccacgatctttgatgaggctcttcaccgcgacctcgcaaatttccgcatccaacacccacaggtaacgttactccagtatgtcgatgatcttttgttagcgggtgccaccaaacaggactgcttggaaggaacgaaagcacttctcttggaactcagtgatttaggttatcgtgtgtccgccaagaaagctcagatttgtcgccgcgaagtgacatacttaggctattcattgcgtgatggtcaacgttggcttactgaggcgcgcaagcgtaccgtcgttcaaatccccgcccctaagactaccaaacagatgcgtgaatttcttggcacggcaggtttctgccgtttgtggattcctggctttgctacgttagcggcacccctctatccactcacgaaagagaaaggagaattctcttgggccccagaacatcagaaagcgtttgacgccatcaagaaagcgttattaagcgctcctgctcttgcattgcccgatgtcaccaaaccattcacgctctacgtggatgaacgcaaaggcgtagcccgcggtgtgttgacacagaccttaggaccttggcgtcgtcccgtggcctacctctcgaagaaacttgacccagttgcaagtggttggcctgtctgcttgaaagctattgccgcagttgcaatcctcgtcaaagatgccgacaaacttactttgggccagaacctgactgttattgcaccacacgcccttgaaaacatcgttcgtcagccacctgatcgctggatgaccaatgctcgcatgacgcattatcagagcctcttgcttaccgaacgcgtgacttttgctccacctgcagccttaaaccccgcaacccttttacccgaagaaacagatgagcctgtgacgcatgactgtcatgaactcttgattgaagaaactggcgtacgcaaggacctcaccgatattccattaacaggtgaggtacttacgtggtttaccgaggggtcctcttatgtcgtcgaaggcaaacgtatggctggtgccgccgttgttgatggcacccgtactatctgggcaagcagcttacccgaaggcacgagtgctcagaaagcagagttgatggccttgacccaagccttacgccttgctgaagggaaatcgatcaatatttacaccgattcacgctatgcattcgccacggcacatgtacacggtgccatctacaaacaacgtggtttgttaacttctgctggccgcgagattaagaacaaagaagaaatcctttccttacttgaagccttacacctccccaaacgtctcgctattattcattgtccagggcatcagaaagcaaaagatcctatcagccgtgggaatcaaatggcagatcgtgtcgctaaacaggcagcccaaggcgttaacttgttgcccatgattgagacccctaaagctcca

SEQ ID NO: 370 - protein, 687 aa, synthetic construct
  REGION 1..687: note = Engineered reverse transcriptase variants
MHHHHHHGGSGVLTLQLDDEYRLYSPLVKPDQNIQFWLEQFPQAWAETGGMGLAKQVPPQVIQLKASATPVSVRQYPLSKEAQEGIRPHVQRLIQQGILVPVQSPWNTPLLPVRKPGTNDYRPVQDLREVNKRVQDIHPTVPNPYNLLCALPPQRSWYTVLDLKDAFFCLRLHPTSQPLFAFEWRDPDTGRTGQLTWTRLPQGFKNSPTIFDEALHRDLANFRIQHPQVTLLQYVDDLLLAGATKQDCLEGTKALLLELSDLGYRVSAKKAQICRREVTYLGYSLRDGQRWLTEARKRTVVQIPAPKTTKQMREFLGTAGFCRLWIPGFATLAAPLYPLTKEKGEFSWAPEHQKAFDAIKKALLSAPALALPDVTKPFTLYVDERKGVARGVLTQTLGPWRRPVAYLSKKLDPVASGWPVCLKAIAAVAILVKDADKLTLGQNLTVIAPHALENIVRQPPDRWMTNARMTHYQSLLLTERVTFAPPAALNPATLLPEETDEPVTHDCHELLIEETGVRKDLTDIPLTGEVLTWFTEGSSYVVEGKRMAGAAVVDGTRTIWASSLPEGTSAQKAELMALTQALRLAEGKSINIYTDSRYAFATAHVHGAIYKQRGLLTSAGREIKNKEEILSLLEALHLPKRLAIIHCPGHQKAKDPISRGNQMADRVAKQAAQGVNLLPMIETPKAP

SEQ ID NO: 371 - DNA, 2061 bp, synthetic construct
  misc_feature 1..2061: note = Engineered reverse transcriptase variants
  source 1..2061: mol_type = other DNA
atgcatcaccatcaccatcatggtggtagcggagtgctgacccttcagctggatgatgaatatcgcttgtacagtccgctggtcaaaccagaccaaaacattcagttctggctcgaacagtttccgcaagcgtgggctgaaactggtggcatgggcctggccaaacaggttcctcctcaggtaatccagttaaaggcatctgccacgccggtgtcagttcgccagtatccgctgtcgaaagaagcgcaggaggggattcgcccacacgtgcagcgtttgatccagcagggcattctggtaccggttcaaagcccctggaataccccgcttttaccagtccgcaaaccgggtacaaacgattaccgtcctgtgcaagacctgcgcctggtcaataaacgtgtgcaggatatccacccaaccgttccgaacccgtataatctgttgtgcgcgttaccgccgcagcgttcctggtacacggtgctggacctgaaggacgcgttcttctgtcttcgcctccatcccaccagccagccactgtttgcctttgaatggcgcgatcctgatacgggccgtactgggcaattaacatggacccgtttgccgcagggctttaagaacagtcccacgatctttgatgaggctcttcaccgcgacctcgcaaatttccgcatccaacacccacaggtaacgttactccagtatgtcgatgatcttttgttagcgggtgccaccaaacaggactgcttggaaggaacgaaagcacttctcttggaactcagtgatttaggttatcgtgtgtccgccaagaaagctcagatttgtcgccgcgaagtgacatacttaggctattcattgcgtgatggtcaacgttggcttactgaggcgcgcaagaaaaccgtcgttcaaatccccgcccctaagaccgcgaaacagatgcgtgaatttcttggcacggcaggtttctgccgtttgtggattcctggctttgctacgttagcggcacccctctatccactcacgaaagagaaaggagaattctcttgggccccagaacatcagaaagcgtttgacgccatcaagaaagcgttattaagcgctcctgctcttgcattgcccgatgtcaccaaaccattcacgctctacgtggatgaacgcaaaggcgtagcccgcggtgtgttgacacagaccttaggaccttggcgtcgtcccgtggcctacctctcgaagaaacttgacccagttgcaagtggttggcctgtctgcttgaaagctattgccgcagttgcaatcctcgtcaaagatgccgacaaacttactttgggccagaacctgactgttattgcaccacacgcccttgaaaacatcgttcgtcagccacctgatcgctggatgaccaatgctcgcatgacgcattatcagagcctcttgcttaccgaacgcgtgacttttgctccacctgcagccttaaaccccgcaacccttttacccgaagaaacagatgagcctgtgacgcatgactgtcatgaactcttgattgaagaaactggcgtacgcaaggacctcaccgatattccattaacaggtgaggtacttacgtggtttaccgaggggtcctcttatgtcgtcgaaggcaaacgtatggctggtgccgccgttgttgatggcacccgtactatctgggcaagcagcttacccgaaggcacgagtgctcagaaagcagagttgatggccttgacccaagccttacgccttgctgaagggaaatcgatcaatatttacaccgattcacgctatgcattcgccacggcacatgtacacggtgccatctacaaacaacgtggtttgttaacttctgctggccgcgagattaagaacaaagaagaaatcctttccttacttgaagccttacacctccccaaacgtctcgctattattcattgtccagggcatcagaaagcaaaagatcctatcagccgtgggaatcaaatggcagatcgtgtcgctaaacaggcagcccaaggcgttaacttgttgcccatgattgagacccctaaagctcca

SEQ ID NO: 372 - protein, 687 aa, synthetic construct
  REGION 1..687: note = Engineered reverse transcriptase variants
MHHHHHHGGSGVLTLQLDDEYRLYSPLVKPDQNIQFWLEQFPQAWAETGGMGLAKQVPPQVIQLKASATPVSVRQYPLSKEAQEGIRPHVQRLIQQGILVPVQSPWNTPLLPVRKPGTNDYRPVQDLRLVNKRVQDIHPTVPNPYNLLCALPPQRSWYTVLDLKDAFFCLRLHPTSQPLFAFEWRDPDTGRTGQLTWTRLPQGFKNSPTIFDEALHRDLANFRIQHPQVTLLQYVDDLLLAGATKQDCLEGTKALLLELSDLGYRVSAKKAQICRREVTYLGYSLRDGQRWLTEARKKTVVQIPAPKTAKQMREFLGTAGFCRLWIPGFATLAAPLYPLTKEKGEFSWAPEHQKAFDAIKKALLSAPALALPDVTKPFTLYVDERKGVARGVLTQTLGPWRRPVAYLSKKLDPVASGWPVCLKAIAAVAILVKDADKLTLGQNLTVIAPHALENIVRQPPDRWMTNARMTHYQSLLLTERVTFAPPAALNPATLLPEETDEPVTHDCHELLIEETGVRKDLTDIPLTGEVLTWFTEGSSYVVEGKRMAGAAVVDGTRTIWASSLPEGTSAQKAELMALTQALRLAEGKSINIYTDSRYAFATAHVHGAIYKQRGLLTSAGREIKNKEEILSLLEALHLPKRLAIIHCPGHQKAKDPISRGNQMADRVAKQAAQGVNLLPMIETPKAP

SEQ ID NO: 373 - DNA, 2061 bp, synthetic construct
  misc_feature 1..2061: note = Engineered reverse transcriptase variants
  source 1..2061: mol_type = other DNA
atgcatcaccatcaccatcatggtggtagcggagtgctgacccttcagctggatgatgaatatcgcttgtacagtccgctggtcaaaccagaccaaaacattcagttctggctcgaacagtttccgcaagcgtgggctgaaactggtggcatgggcctggccaaacaggttcctcctcaggtaatccagttaaaggcatctgccacgccggtgtcagttcgtcagtatccgctgtcgaaagaagcgcaagaggggattcgcccacacgtgcagcgtttgatccagcagggcattctggtaccggttcaaagcccctggaataccccgcttttaccagtccgcaaaccgggtacaaacgattaccgtcctgtgcaagacctgcgcgaagtcaataaacgtgtgcaggatatccacccaaccgttccgaacccgtataatctgttgtgcgcgttaccgccgcagcgttcctggtacacggtgctggacctgaaggacgcgttcttctgtcttcgcctccatcccaccagccagccactgtttgcctttgaatggcgcgatcctgatacgggccgtactgggcaattaacatggacccgtttgccgcagggctttaagaacagtcccacgatctttgatgaggctcttcaccgcgacctcgcaaatttccgcatccaacacccacaggtaacgttactccagtatgtcgatgatcttttgttagcgggtgccaccaaacaggactgcttggaaggaacgaaagcacttctcttggaactcagtgatttaggttatcgtgtgtccgccaagaaagctcagatttgtcgccgcgaagtgacatacttaggctattcattgcgtgatggtcaacgttggcttactgaggcgcgcaagcgtaccgtcgttcaaatccccgcccctaagaccgcgaaacagatgcgtgaatttcttggcacggcaggtttctgccgtttgtggattcctggctttgctacgttagcggcacccctctatccactcacgaaagagaaaggagaattctcttgggccccagaacatcagaaagcgtttgacgccatcaagaaagcgttattaagcgctcctgctcttgcattgcccgatgtcaccaaaccattcacgctctacgtggatgaacgcaaaggcgtagcccgcggtgtgttgacacagaccttaggaccttggcgtcgtcccgtggcctacctctcgaagaaacttgacccagttgcaagtggttggcctgtctgcttgaaagctattgccgcagttgcaatcctcgtcaaagatgccgacaaacttactttgggccagaacctgactgttattgcaccacacgcccttgaaaacatcgttcgtcagccacctgatcgctggatgaccaatgctcgcatgacgcattatcagagcctcttgcttaccgaacgcgtgacttttgctccacctgcagccttaaaccccgcaacccttttacccgaagaaacagatgagcctgtgacgcatgactgtcatcagctcttgattgaagaaactggcgtacgcaaggacctcaccgatattccattaacaggtgaggtacttacgtggtttaccgaggggtcctcttatgtcgtcgaaggcaaacgtatggctggtgccgccgttgttgatggcacccgtactatctgggcaagcagcttacccgaaggcacgagtgctcagaaagcacaattgatggccttgacccaagccttacgccttgctgaagggaaatcgatcaatatttacaccgattcacgctatgcattcgccacggcacatgtacacggtgccatctacaaacaacgtggtttgttaacttctgctggccgcgagattaagaacaaagaagaaatcctttccttacttgaagccttacacctccccaaacgtctcgctattattcattgtccagggcatcagaaagcaaaagatcctatcagccgtgggaatcaaatggcagatcgtgtcgctaaacaggcagcccaaggcgttaacttgttgcccatgattgagacccctaaagctcca

SEQ ID NO: 374 - protein, 687 aa, synthetic construct
  REGION 1..687: note = Engineered reverse transcriptase variants
MHHHHHHGGSGVLTLQLDDEYRLYSPLVKPDQNIQFWLEQFPQAWAETGGMGLAKQVPPQVIQLKASATPVSVRQYPLSKEAQEGIRPHVQRLIQQGILVPVQSPWNTPLLPVRKPGTNDYRPVQDLREVNKRVQDIHPTVPNPYNLLCALPPQRSWYTVLDLKDAFFCLRLHPTSQPLFAFEWRDPDTGRTGQLTWTRLPQGFKNSPTIFDEALHRDLANFRIQHPQVTLLQYVDDLLLAGATKQDCLEGTKALLLELSDLGYRVSAKKAQICRREVTYLGYSLRDGQRWLTEARKRTVVQIPAPKTAKQMREFLGTAGFCRLWIPGFATLAAPLYPLTKEKGEFSWAPEHQKAFDAIKKALLSAPALALPDVTKPFTLYVDERKGVARGVLTQTLGPWRRPVAYLSKKLDPVASGWPVCLKAIAAVAILVKDADKLTLGQNLTVIAPHALENIVRQPPDRWMTNARMTHYQSLLLTERVTFAPPAALNPATLLPEETDEPVTHDCHQLLIEETGVRKDLTDIPLTGEVLTWFTEGSSYVVEGKRMAGAAVVDGTRTIWASSLPEGTSAQKAQLMALTQALRLAEGKSINIYTDSRYAFATAHVHGAIYKQRGLLTSAGREIKNKEEILSLLEALHLPKRLAIIHCPGHQKAKDPISRGNQMADRVAKQAAQGVNLLPMIETPKAP

SEQ ID NO: 375 - DNA, 2061 bp, synthetic construct
  misc_feature 1..2061: note = Engineered reverse transcriptase variants
  source 1..2061: mol_type = other DNA
atgcatcaccatcaccatcatggtggtagcggagtgctgacccttcagctggatgatgaatatcgcttgtacagtccgctggtcaaaccagaccaaaacattcagttctggctcgaacagtttccgcaagcgtgggctgaaactggtggcatgggcctggccaaacaggttcctcctcaggtaatccagttaaaggcatctgccacgccggtgtcagttcgtcagtatccgctgtcgaaagaagcgcaggagaggattcgcccacacgtgcagcgtttgatccagcagggcattctggtaccggttcaaagcccctggaataccccgcttttaccagtccgtaaaccgggtacaaacgattaccgtcctgtgcaagacctgcgcgaagtcaataaacgtgtgcaggatatccacccaaccgttccgaacccgtataatctgttgtgcgcgttaccgccgcagcgttcctggtacacggtgctggacctgaaggacgcgttcttctgtcttcgcctccatcccaccagccagccactgtttgcctttgaatggcgcgatcctgatacgggccgtactgggcaattaacatggacccgtttgccgcagggctttaagaacagtcccacgatctttgatgaggctcttcaccgcgacctcgcaaatttccgcatccaacacccacaggtaacgttactccagtatgtcgatgatcttttgttagcgggtgccaccaaacaggactgcttggaaggaacgaaagcacttctcttggaactcagtgatttaggttatcgtgtgtccgccaagaaagctcagatttgtcgccgcgaagtgacatacttaggctattcattgcgtgatggtcaacgttggcttactgaggcgcgcaagcgcaccgtcgttcaaatccccgcccctaagaccgcgaaacagatgcgtgaatttcttggcacggcaggtttctgccgtttgtggattcctggctttgctacgttagcggcacccctctatccactcacgaaagagaaaggagaattctcttgggccccagaacatcagaaagcgtttgacgccatcaagaaagcgttattaagcgctcctgctcttgcattgcccgatgtcaccaaaccattcacgctctacgtggatgaacgcaaaggcgtagcccgcggtgtgttgacacagaccttaggaccttggcgtcgtcccgtggcctacctctcgaagaaacttgacccagttgcaagtggttggcctgtctgcttgaaagctattgccgcagttgcaatcctcgtcaaagatgccgacaaacttactttgggccagaacctgactgttattgcaccacacgcccttgaaaacatcgttcgtcagccacctgatcgctggatgaccaatgctcgcatgacgcattatcagagcctcttgcttaccgaacgcgtgacttttgctccacctgcagccttaaaccccgcaacccttttacccgaagaaacagatgagcctgtgacgcatgactgtcatgaactcttgattgaagaaactggcgtacgcaaggacctcaccgatattccattaacaggtgaggtacttacgtggtttaccgaggggtcctcttatgtcgtcgaaggcaaacgtatggctggtgccgccgttgttgatggcacccgtactatctgggcaagcagcttacccgaaggcacgagtgctcagaaagcagagttgatggccttgacccaagccttacgccttgctgaagggaaatcgatcaatatttacaccgattcacgctatgcattcgccacggcacatgtacacggtgccatctacaaacaacgtggtttgttaacttctgctggccgcgagattaagaacaaagaagaaatcctttccttacttgaagccttacacctccccaaacgtctcgctattattcattgtccagggcatcagaaagcaaaagatcctatcagccgtgggaatcaaatggcagatcgtgtcgctaaacaggcagcccaaggcgttaacttgttgcccatgattgagacccctaaagctcca

SEQ ID NO: 376 - protein, 687 aa, synthetic construct
  REGION 1..687: note = Engineered reverse transcriptase variants
MHHHHHHGGSGVLTLQLDDEYRLYSPLVKPDQNIQFWLEQFPQAWAETGGMGLAKQVPPQVIQLKASATPVSVRQYPLSKEAQERIRPHVQRLIQQGILVPVQSPWNTPLLPVRKPGTNDYRPVQDLREVNKRVQDIHPTVPNPYNLLCALPPQRSWYTVLDLKDAFFCLRLHPTSQPLFAFEWRDPDTGRTGQLTWTRLPQGFKNSPTIFDEALHRDLANFRIQHPQVTLLQYVDDLLLAGATKQDCLEGTKALLLELSDLGYRVSAKKAQICRREVTYLGYSLRDGQRWLTEARKRTVVQIPAPKTAKQMREFLGTAGFCRLWIPGFATLAAPLYPLTKEKGEFSWAPEHQKAFDAIKKALLSAPALALPDVTKPFTLYVDERKGVARGVLTQTLGPWRRPVAYLSKKLDPVASGWPVCLKAIAAVAILVKDADKLTLGQNLTVIAPHALENIVRQPPDRWMTNARMTHYQSLLLTERVTFAPPAALNPATLLPEETDEPVTHDCHELLIEETGVRKDLTDIPLTGEVLTWFTEGSSYVVEGKRMAGAAVVDGTRTIWASSLPEGTSAQKAELMALTQALRLAEGKSINIYTDSRYAFATAHVHGAIYKQRGLLTSAGREIKNKEEILSLLEALHLPKRLAIIHCPGHQKAKDPISRGNQMADRVAKQAAQGVNLLPMIETPKAP

SEQ ID NO: 377 - DNA, 2061 bp, synthetic construct
  misc_feature 1..2061: note = Engineered reverse transcriptase variants
  source 1..2061: mol_type = other DNA
atgcatcaccatcaccatcatggtggtagcggagtgctgacccttcagctggatgatgaatatcgcttgtacagtccgctggtcaaaccagaccaaaacattcagttctggctcgaacagtttccgcaagcgtgggctgaaactggtggcatgggcctggccaaacaggttcctcctcaggtaatccagttaaaggcatctgccacgccggtgtcagttcgccagtatccgctgtcgaaagaagcgcaggaggggattcgcccacacgtgcagcgtttgatccagcagggcagcctggtaccggttcaaagcccctggaataccccgcttttaccagtccgcaaaccgggtacatatgattaccgtcccgtgcaagacctgcgcctggtcaattttcgtgtgcaggatatccacccaaccgttccgaacccgtataatctgttgtgcgcgttaccgccgcagcgttcctggtacacggtgctggacctgaaggacgcgttcttctgtcttcgcctccatcccaccagccagccactgtttgcctttgaatggcgcgatcctgatacgggccgtactgggcaattacattggacccgtttgccgcagggctttaagaacagtcccacgatctttgacgaggctcttcaccgcgacctcgcaaatttccgcatccaacacccacaggtaacgttactccagtatgtcgatgatcttttgttagcgggtgccaccaaacaggactgcttggaaggaacgaaagcacttctcttggaactcagtgatttaggttatcgtgtgtccgccaagaaagctcagatttgtcgccgcgaagtgacatacttaggctattcattgcgtgatggtcaacgttggcttactgaggcgcgcaagaaaaccgtcgttcaaatccccgcccctaagaccgcgaaacaaatgcgtgagtttcttggcacggcaggtttctgccgtttgtggattcctggctttgctacgttagcggcacccctctatccactcacgaaagagaagggagaattctcttgggccccagaacatcagaaagcgtttgacgccatcaagaaagcgttattaagcgctcctgctcttgcattgcccgatgtcaccaaaccattcacgctctacgtggatgaacgcaaaggcgtagcccgcggtgtgttgacacagaccttaggaccttggcgtcgtcccgtggcctacctctcgaagaaacttgacccagttgcaagtggttggcctgtctgcttgaaagctattgccgcagttgcaatcctcgtcaaagatgccgacaaacttactttgggccagaacctgactgttattgcaccacacgcccttgaaaacatcgttcgtcagccacctgatcgctggatgaccaatgctcgcatgacgcattatcagagcctcttgcttaccgaacgcgtgacttttgctccacctgcagccttaaaccccgcaacccttttacccgaagaaacagatgagcctgtgacgcatgactgtcatgaactcttgattgaagaaactggcgtacgcaaggacctcaccgatattccattaacaggtgaggtacttacgtggtttaccgaggggtcctcttatgtcgtcgaaggcaaacgtatggctggtgccgccgttgttgatggcacccgtactatctgggcaagcagcttacccgaaggcacgagtgctcagaaagcagagttgatggccttgacccaagccttacgccttgctgaagggaaatcgatcaatatttacaccgattcacgctatgcattcgccacggcacatgtacacggtgccatctacaaacaacgtggtttgttaacttctgctggccgcgagattaagaacaaagaagaaatcctttccttacttgaagccttacacctccccaaacgtctcgctattattcattgtccagggcatcagaaagcaaaagatcctatcagccgtgggaatcaaatggcagatcgtgtcgctaaacaggcagcccaaggcgttaacttgttgcccatgattgagacccctaaagctcca

SEQ ID NO: 378 - protein, 687 aa, synthetic construct
  REGION 1..687: note = Engineered reverse transcriptase variants
MHHHHHHGGSGVLTLQLDDEYRLYSPLVKPDQNIQFWLEQFPQAWAETGGMGLAKQVPPQVIQLKASATPVSVRQYPLSKEAQEGIRPHVQRLIQQGSLVPVQSPWNTPLLPVRKPGTYDYRPVQDLRLVNFRVQDIHPTVPNPYNLLCALPPQRSWYTVLDLKDAFFCLRLHPTSQPLFAFEWRDPDTGRTGQLHWTRLPQGFKNSPTIFDEALHRDLANFRIQHPQVTLLQYVDDLLLAGATKQDCLEGTKALLLELSDLGYRVSAKKAQICRREVTYLGYSLRDGQRWLTEARKKTVVQIPAPKTAKQMREFLGTAGFCRLWIPGFATLAAPLYPLTKEKGEFSWAPEHQKAFDAIKKALLSAPALALPDVTKPFTLYVDERKGVARGVLTQTLGPWRRPVAYLSKKLDPVASGWPVCLKAIAAVAILVKDADKLTLGQNLTVIAPHALENIVRQPPDRWMTNARMTHYQSLLLTERVTFAPPAALNPATLLPEETDEPVTHDCHELLIEETGVRKDLTDIPLTGEVLTWFTEGSSYVVEGKRMAGAAVVDGTRTIWASSLPEGTSAQKAELMALTQALRLAEGKSINIYTDSRYAFATAHVHGAIYKQRGLLTSAGREIKNKEEILSLLEALHLPKRLAIIHCPGHQKAKDPISRGNQMADRVAKQAAQGVNLLPMIETPKAP

SEQ ID NO: 379 - DNA, 2061 bp, synthetic construct
  misc_feature 1..2061: note = Engineered reverse transcriptase variants
  source 1..2061: mol_type = other DNA
atgcatcaccatcaccatcatggtggtagcggagtgctgacccttcagctggatgatgaatatcgcttgtacagtccgctggtcaaaccagaccaaaacattcagttctggctcgaacagtttccgcaagcgtgggctgaaactggtggcatgggcctggccaaacaggttcctcctcaggtaatccagttaaaggcatctgccacgccggtgtcagttcgtcagtatccgctgtcgaaagaagcgcaagaggggattcgcccacacgtgcagcgtttgatccagcagggcagcctggtaccggttcaaagcccctggaataccccgcttttaccagtccgcaaaccgggtacaaacgattaccgtcctgtgcaagacctgcgcgaagtcaataaacgtgtgcaggatatccacccaaccgttccgaacccgtataatctgttgtgcgcgttaccgccgcagcgttcctggtacacggtgctggacctgaaggacgcgttcttctgtcttcgcctccatcccaccagccagccactgtttgcctttgaatggcgcgatcctgatacgggccgtactgggcaattaacatggacccgtttgccgcagggctttaagaacagtcccacgatctttgatgaggctcttcaccgcgacctcgcaaatttccgcatccaacacccacaggtaacgttactccagtatgtcgatgatcttttgttagcgggtgccaccaaacaggactgcttggaaggaacgaaagcacttctcttggaactcagtgatttaggttatcgtgtgtccgccaagaaagctcagatttgtcgccgcgaagtgacatacttaggctattcattgcgtgatggtcaacgttggcttactgaggcgcgcaagaaaaccgtcgttcaaatccccgcccctaagaccgcgaaacaaatgcgtgagtttctttgcacggcaggtttctgccgtttgtggattcctggctttgctacgttagcggcacccctctatccactcacgaaagaggtcggagaattctcttgggccccagaacatcagaaagcgccggacgccatcaagaaagcgttattaagcgctcctgctcttgcattgcccgatgtcaccaaaccattcacgctctacgtggatgaacgcaaaggcgtagcccgcggtgtgttgacacagaccttaggaccttggcgtcgtcccgtggcctacctctcgaagaaacttgacccagttgcaagtggttggcctgtctgcttgaaagctattgccgcagttgcaatcctcgtcaaagatgccgacaaacttactttgggccagaacctgactgttattgcaccacacgcccttgaaaacatcgttcgtcagccacctgatcgctggatgaccaatgctcgcatgacgcattatcagagcctcttgcttaccgaacgcgtgacttttgctccacctgcagccttaaaccccgcaacccttttacccgaagaaacagatgagcctgtgacgcatgactgtcatgaactcttgattgaagaaactggcgtacgcaaggacctcaccgatattccattaacaggtgaggtacttacgtggtttaccgaggggtcctcttatgtcgtcgaaggcaaacgtatggctggtgccgccgttgttgatggcacccgtactatctgggcaagcagcttacccgaaggcacgagtgctcagaaagcagagttgatggccttgacccaagccttacgccttgctgaagggaaatcgatcaatatttacaccgattcacgctatgcattcgccacggcacatgtacacggtgccatctacaaacaacgtggtttgttaacttctgctggccgcgagattaagaacaaagaagaaatcctttccttacttgaagccttacacctccccaaacgtctcgctattattcattgtccagggcatcagaaagcaaaagatcctatcagccgtgggaatcaaatggcagatcgtgtcgctaaacaggcagcccaaggcgttaacttgttgcccatgattgagacccctaaagctcca

SEQ ID NO: 380 - protein, 687 aa, synthetic construct
  REGION 1..687: note = Engineered reverse transcriptase variants
MHHHHHHGGSGVLTLQLDDEYRLYSPLVKPDQNIQFWLEQFPQAWAETGGMGLAKQVPPQVIQLKASATPVSVRQYPLSKEAQEGIRPHVQRLIQQGSLVPVQSPWNTPLLPVRKPGTNDYRPVQDLREVNKRVQDIHPTVPNPYNLLCALPPQRSWYTVLDLKDAFFCLRLHPTSQPLFAFEWRDPDTGRTGQLTWTRLPQGFKNSPTIFDEALHRDLANFRIQHPQVTLLQYVDDLLLAGATKQDCLEGTKALLLELSDLGYRVSAKKAQICRREVTYLGYSLRDGQRWLTEARKKTVVQIPAPKTAKQMREFLCTAGFCRLWIPGFATLAAPLYPLTKEVGEFSWAPEHQKAPDAIKKALLSAPALALPDVTKPFTLYVDERKGVARGVLTQTLGPWRRPVAYLSKKLDPVASGWPVCLKAIAAVAILVKDADKLTLGQNLTVIAPHALENIVRQPPDRWMTNARMTHYQSLLLTERVTFAPPAALNPATLLPEETDEPVTHDCHELLIEETGVRKDLTDIPLTGEVLTWFTEGSSYVVEGKRMAGAAVVDGTRTIWASSLPEGTSAQKAELMALTQALRLAEGKSINIYTDSRYAFATAHVHGAIYKQRGLLTSAGREIKNKEEILSLLEALHLPKRLAIIHCPGHQKAKDPISRGNQMADRVAKQAAQGVNLLPMIETPKAP

SEQ ID NO: 381 - DNA, 2061 bp, synthetic construct
  misc_feature 1..2061: note = Engineered reverse transcriptase variants
  source 1..2061: mol_type = other DNA
atgcatcaccatcaccatcatggtggtagcggagtgctgacccttcagctggatgatgaatatcgcttgtacagtccgctggtcaaaccagaccaaaacattcagttctggctcgaacagtttccgcaagcgtgggctgaaactggtggcatgggcctggccaaacaggttcctcctcaggtaatccagttaaaggcatctgccacgccggtgtcagttcgtcagtatccgctgtcgaaagaagcgcaagaggggattcgcccacacgtgcagcgtttgatccagcagggcattctggtaccggttcaaagcccctggaataccccgcttttaccagtccgcaaaccgggtacaaacgattaccgtcctgtgcaagacctgcgcgaagtcaataaacgtgtgcaggatatccacccaaccgttccgaacccgtataatctgttgtgcgcgttaccgccgcagcgttcctggtacacggtgctggacctgaaggacgcgttcttctgtcttcgcctccatcccaccagccagccactgtttgcctttgaatggcgcgatcctgatacgggccgtactgggcaattaacatggacccgtttgccgcagggctttatgaacagtcccacgatctttaaggaggctcttcaccgcgacctcgcaaatttccgcatccaacacccacaggtaacgttactccagtatgtcgatgatcttttgttagcgggtgccaccaaacaggactgcttggaaggaacgaaagcacttctcttggaactcagtgatttaggttatcgtgtgtccgccaagaaagctcagatttgtcgccgcgaagtgacatacttaggctattcattgcgtgatggtcaacgttggcttactgaggcgcgcaagaagaccgtcgttcaaatccccgcccctaagactgaaaaacagatgcgtgaatttcttggcacgtcgggtttctgccgtttgtggattcctggctttgctacgttagcggcacccctctatccactcacgaaatggaaaggagaattctcttgggccccagaacatcagaaagcgtttgacgccatcaagaaagcgttattaagcgctcctgctcttgcattgcccgatgtcaccaaaccattcacgctctacgtggatgaacgcaaaggcgtagcccgcggtgtgttgacacagaccttaggaccttggcgtcgtcccgtggcctacctctcgaagaaacttgacccagttgcaagtggttggcctgtctgcttgaaagctattgccgcagttgcaatcctcgtcaaagatgccgacaaacttactttgggccagaacctgactgttattgcaccacacgcccttgaaaacatcgttcgtcagccacctgatcgctggatgaccaatgctcgcatgacgcattatcagagcctcttgcttaccgaacgcgtgacttttgctccacctgcagccttaaaccccgcaacccttttacccgaagaaacagatgagcctgtgacgcatgactgtcatcaactcttgattgaagaaactggcgtacgcaaggacctcaccgatattccattaacaggtgaggtacttacgtggtttaccgaggggtcctcttatgtcgtcgaaggcaaacgtatggctggtgccgccgttgttgatggcacccgtactatctgggcaagcagcttacccgaaggcacgagtgctcagaaagcagaattgatggccttgacccaagccttacgccttgctgaagggaaatcgatcaatatttacaccgattcacgctatgcattcgccacggcacatgtacacggtgccatctacaaacaacgtggtttgttaacttctgctggccgcgagattaagaacaaagaagaaatcctttccttacttgaagccttacacctccccaaacgtctcgctattattcattgtccagggcatcagaaagcaaaagatcctatcagccgtgggaatcaaatggcagatcgtgtcgctaaacaggcagcccaaggcgttaacttgttgcccatgattgagacccctaaagctcca

SEQ ID NO: 382 - protein, 687 aa, synthetic construct
  REGION 1..687: note = Engineered reverse transcriptase variants
MHHHHHHGGSGVLTLQLDDEYRLYSPLVKPDQNIQFWLEQFPQAWAETGGMGLAKQVPPQVIQLKASATPVSVRQYPLSKEAQEGIRPHVQRLIQQGILVPVQSPWNTPLLPVRKPGTNDYRPVQDLREVNKRVQDIHPTVPNPYNLLCALPPQRSWYTVLDLKDAFFCLRLHPTSQPLFAFEWRDPDTGRTGQLTWTRLPQGFMNSPTIFKEALHRDLANFRIQHPQVTLLQYVDDLLLAGATKQDCLEGTKALLLELSDLGYRVSAKKAQICRREVTYLGYSLRDGQRWLTEARKKTVVQIPAPKTEKQMREFLGTSGFCRLWIPGFATLAAPLYPLTKWKGEFSWAPEHQKAFDAIKKALLSAPALALPDVTKPFTLYVDERKGVARGVLTQTLGPWRRPVAYLSKKLDPVASGWPVCLKAIAAVAILVKDADKLTLGQNLTVIAPHALENIVRQPPDRWMTNARMTHYQSLLLTERVTFAPPAALNPATLLPEETDEPVTHDCHQLLIEETGVRKDLTDIPLTGEVLTWFTEGSSYVVEGKRMAGAAVVDGTRTIWASSLPEGTSAQKAELMALTQALRLAEGKSINIYTDSRYAFATAHVHGAIYKQRGLLTSAGREIKNKEEILSLLEALHLPKRLAIIHCPGHQKAKDPISRGNQMADRVAKQAAQGVNLLPMIETPKAP

SEQ ID NO: 383 - DNA, 2061 bp, synthetic construct
  misc_feature 1..2061: note = Engineered reverse transcriptase variants
  source 1..2061: mol_type = other DNA
atgcatcaccatcaccatcatggtggtagcggagtgctgacccttcagctggatgatgaatatcgcttgtacagtccgctggtcaaaccagaccaaaacattcagttctggctcgaacagtttccgcaagcgtgggctgaaactggtggcatgggcctggccaaacaggttcctcctcaggtaatccagttaaaggcatctgccacgccggtgtcagttcgtcagtatccgctgtcgaaagaagcgcaagaggggattcgcccacacgtgcagcgtttgatccagcagggcattctggtaccggttcaaagcccctggaataccccgcttttaccagtccgcaaaccgggtacaaacgattaccgtcctgtgcaagacctgcgcgaagtcaataaacgtgtgcaggatatccacccaaccgttccgaacccgtataatctgttgtgcgcgttaccgccgcagcgttcctggtacacggtgctggacctgaaggacgcgttcttctgtcttcgcctccatcccaccagccagccactgtttgcctttgaatggcgcgatcctgatacgggccgtactgggcaattaacatggacccgtttgccgcagggctttaagaacagtcccacgatctttgatgaggctcttcaccgcgacctcgcaaatttccgcatccaacacccacaggtaacgttactccagtatgtcgatgatcttttgttagcgggtgccaccaaacaggactgcttggaaggaacgaaagcacttctcttggaactcagtgatttaggttatcgtgtgtccgccaagaaagctcagatttgtcgccgcgaagtgacatacttaggctattcattgcgtgatggtcaacgttggcttactgaggcgcgcaagcgtaccgtcgttcaaatccccgcccctaagaccgcgaaacagatgcgtgaatttcttggcacggcaggtttctgccgtttgtggattcctggctttgctacgttagcggcacccctctatccactcacgaaagagaaaggagaattctcttgggccccagaacatcagaaagcgtttgacgccatcaagaaagcgttattaagcgctcctgctcttgcattgcccgatgtcaccaaaccattcacgctctacgtggatgaacgcaaaggcgtagcccgcggtgtgttgacacagaccttaggaccttggcgtcgtcccgtggcctacctctcgaagaaacttgacccagttgcaagtggttggcctgtctgcttgaaagctattgccgcagttgcaatcctcgtcaaagatgccgacaaacttactttgggccagaacattactgttattgcaccacacgcccttgaaaacatcgttcgtcagccacctgatcgctggatgaccaatgctcgcatgacgcattatcagagcctcttgcttaccgaacgcgtgacttttgctccacctgcagccttaaaccccgcaacccttttacccgaagaaacagatgagcctgtgacgcatgactgtcatgaactcttgattgaagaaactggcgtacgcaaggacctcaccgatattccattaacaggtgaggtacttacgtggtttaccgaggggtcctcttatgtcgtcgaaggcaaacgtatggctggtgccgccgttgttgatggcacccgtactatctgggcaagcagcttacccgaaggcacgagtgctcagaaagcagagttgatggccttgacccaagccttacgccttgctgaagggaaatcgatcaatatttacaccgattcacgctatgcattcgccacggcacatgtacacggtgccatctacaaacaacgtggtttgttaacttctgctggccgcgagattaagaacaaagaagaaatcctttccttacttgaagccttacacctccccaaacgtctcgctattattcattgtccagggcatcagaaagcaaaagatcctatcagccgtgggaatcaaatggcagatcgtgtcgctaaacaggcagcccaaggcgttaacttgttgcccatgattgagacccctaaagctcca

SEQ ID NO: 384 - protein, 687 aa, synthetic construct
  REGION 1..687: note = Engineered reverse transcriptase variants
MHHHHHHGGSGVLTLQLDDEYRLYSPLVKPDQNIQFWLEQFPQAWAETGGMGLAKQVPPQVIQLKASATPVSVRQYPLSKEAQEGIRPHVQRLIQQGILVPVQSPWNTPLLPVRKPGTNDYRPVQDLREVNKRVQDIHPTVPNPYNLLCALPPQRSWYTVLDLKDAFFCLRLHPTSQPLFAFEWRDPDTGRTGQLTWTRLPQGFKNSPTIFDEALHRDLANFRIQHPQVTLLQYVDDLLLAGATKQDCLEGTKALLLELSDLGYRVSAKKAQICRREVTYLGYSLRDGQRWLTEARKRTVVQIPAPKTAKQMREFLGTAGFCRLWIPGFATLAAPLYPLTKEKGEFSWAPEHQKAFDAIKKALLSAPALALPDVTKPFTLYVDERKGVARGVLTQTLGPWRRPVAYLSKKLDPVASGWPVCLKAIAAVAILVKDADKLTLGQNITVIAPHALENIVRQPPDRWMTNARMTHYQSLLLTERVTFAPPAALNPATLLPEETDEPVTHDCHELLIEETGVRKDLTDIPLTGEVLTWFTEGSSYVVEGKRMAGAAVVDGTRTIWASSLPEGTSAQKAELMALTQALRLAEGKSINIYTDSRYAFATAHVHGAIYKQRGLLTSAGREIKNKEEILSLLEALHLPKRLAIIHCPGHQKAKDPISRGNQMADRVAKQAAQGVNLLPMIETPKAP

SEQ ID NO: 385 - DNA, 2061 bp, synthetic construct
  misc_feature 1..2061: note = Engineered reverse transcriptase variants
  source 1..2061: mol_type = other DNA
atgcatcaccatcaccatcatggtggtagcggagtgctgacccttcagctggatgatgaatatcgcttgtacagtccgctggtcaaaccagaccaaaacattcagttctggctcgaacagtttccgcaagcgtgggctgaaactggtggcatgggcctggccaaacaggttcctcctcaggtaatccagttaaaggcatctgccacgccggtgtcagttcgccagtatccggtgtcgaaagaagcgcaggaggggattcgcccacacgtgcagcgtttgatccagcagggcattctggtaccggttcaaagcccctggaataccccgcttttaccagtccgcaaaccgggtacaaacgattaccgtcctgtgcaagacctgcgcgaggtcaattttcgtgtgcaggatatccacccaaccgttccgaacccgtataatctgttgtgcgcgttaccgccgcagcgttcctggtacacggtgctggacctgaaggacgcgttcttctgtcttcgcctccatcccaccagccagccactgtttgcctttgaatggcgcgatcctgatacgggccgtactgggcaattaacgtggacccgtttgccgcagggctttaagaacagtcccacgatctttgacgaggctcttcaccgcgacctcgcaaatttccgcatccaacacccacaggtaacgttactccagtatgtcgatgatcttttgttagcgggtgccaccaaacaggactgcttggaaggaacgaaagcacttctcttggaactcagtgatttaggttatcgtgtgtccgccaagaaagctcagatttgtcgccgcgaagtgacatacttaggctattcattgcgtgatggtcaacgttggcttactgaggcgcgcaagcgtaccgtcgttcaaatccccgcccctaagaccgcgaaacaaatgcgtatgtttcttggcacggcaggtttctgccgtttgtggattcctggctttgctacgttagcggcacccctctatccactcacgaaagagaaaggagaattctcttgggccccagaacatcagaaagcgtttgacgccatcaagaaagcgttattaagcgctcctgctcttgcattgcccgatgtcaccaaaccattcacgctctacgtggatgaacgcaaaggcgtagcccgcggtgtgttgacacagaccttaggaccttggcgtcgtcccgtggcctacctctcgaagaaacttgacccagttgcaagtggttggcctgtctgcttgaaagctattgccgcagttgcaatcctcgtcaaagatgccgacaaacttactttgggccagaacctgactgttattgcaccacacgcccttgaaaacatcgttcgtcagccacctgatcgctggatgaccaatgctcgcatgacgcattatcagagcctcttgcttaccgaacgcgtgacttttgctccacctgcagccttaaaccccgcaacccttttacccgaagaaacagatgagcctgtgacgcatgactgtcatgaactcttgattgaagaaactggcgtacgcaaggacctcaccgatattccattaacaggtgaggtacttacgtggtttaccgaggggtcctcttatgtcgtcgaaggcaaacgtatggctggtgccgccgttgttgatggcacccgtactatctgggcaagcagcttacccgaaggcacgagtgctcagaaagcagagttgatggccttgacccaagccttacgccttgctgaagggaaatcgatcaatatttacaccgattcacgctatgcattcgccacggcacatgtacacggtgccatctacaaacaacgtggtttgttaacttctgctggccgcgagattaagaacaaagaagaaatcctttccttacttgaagccttacacctccccaaacgtctcgctattattcattgtccagggcatcagaaagcaaaagatcctatcagccgtgggaatcaaatggcagatcgtgtcgctaaacaggcagcccaaggcgttaacttgttgcccatgattgagacccctaaagctcca

SEQ ID NO: 386 - protein, 687 aa, synthetic construct
  REGION 1..687: note = Engineered reverse transcriptase variants
MHHHHHHGGSGVLTLQLDDEYRLYSPLVKPDQNIQFWLEQFPQAWAETGGMGLAKQVPPQVIQLKASATPVSVRQYPVSKEAQEGIRPHVQRLIQQGILVPVQSPWNTPLLPVRKPGTNDYRPVQDLREVNFRVQDIHPTVPNPYNLLCALPPQRSWYTVLDLKDAFFCLRLHPTSQPLFAFEWRDPDTGRTGQLTWTRLPQGFKNSPTIFDEALHRDLANFRIQHPQVTLLQYVDDLLLAGATKQDCLEGTKALLLELSDLGYRVSAKKAQICRREVTYLGYSLRDGQRWLTEARKRTVVQIPAPKTAKQMRMFLGTAGFCRLWIPGFATLAAPLYPLTKEKGEFSWAPEHQKAFDAIKKALLSAPALALPDVTKPFTLYVDERKGVARGVLTQTLGPWRRPVAYLSKKLDPVASGWPVCLKAIAAVAILVKDADKLTLGQNLTVIAPHALENIVRQPPDRWMTNARMTHYQSLLLTERVTFAPPAALNPATLLPEETDEPVTHDCHELLIEETGVRKDLTDIPLTGEVLTWFTEGSSYVVEGKRMAGAAVVDGTRTIWASSLPEGTSAQKAELMALTQALRLAEGKSINIYTDSRYAFATAHVHGAIYKQRGLLTSAGREIKNKEEILSLLEALHLPKRLAIIHCPGHQKAKDPISRGNQMADRVAKQAAQGVNLLPMIETPKAP

SEQ ID NO: 387 - DNA, 2061 bp, synthetic construct
  misc_feature 1..2061: note = Engineered reverse transcriptase variants
  source 1..2061: mol_type = other DNA
atgcatcaccatcaccatcatggtggtagcggagtgctgacccttcagctggatgatgaatatcgcttgtacagtccgctggtcaaaccagaccaaaacattcagttctggctcgaacagtttccgcaagcgtgggctgaaactggtggcatgggcctggccaaacaggttcctcctcaggtaatccagttaaaggcatctgccacgccggtgtcagttcgccagtatccggtgtcgaaagaagcggaggaggggattcgcccacacgtgcagcgtttgatccagcagggcagcctggtaccggttcaaagcccctggaataccccgcttttaccagtccgcaaaccgggtacaaacgattaccgtcctgtgcaagacctgcgcgaagtcaataaacgtgtgcaggatatccacccaaccgttccgaacccgtataatctgttgtgcgcgttaccgccgcagcgttcctggtacacggtgctggacctgaaggacgcgttcttctgtcttcgcctccatcccaccagccagccactgtttgcctttgaatggcgcgatcctgatacgggccgtactgggcaattaacatggacccgtttgccgcagggctttaagaacagtcccacgatctttgatgaggctcttcaccgcgacctcgcaaatttccgcatccaacacccacaggtaacgttactccagtatgtcgatgatcttttgttagcgggtgccaccaaacaggactgcttggaaggaacgaaagcacttctcttggaactcagtgatttaggttatcgtgtgtccgccaagaaagctcagatttgtcgccgcgaagtgacatacttaggctattcattgcgtgatggtcaacgttggcttactgaggcgcgcaagcgtaccgtcgttcaaatccccgcccctaagaccgcgaaacagatgcgtgaatttcttggcacggcaggtttctgccgtttgtggattcctggctttgctacgttagcggcacccctctatccactcacgaaagagaagggagaattctcttgggccccagaacatcagaaagcgtttgacgccatcaagaaagcgttattaagcgctcctgctcttgcattgcccgatgtcaccaaaccattcacgctctacgtggatgaacgcaaaggcgtagcccgcggtgtgttgacacagaccttaggaccttggcgtcgtcccgtggcctacctctcgaagaaacttgacccagttgcaagtggttggcctgtctgcttgaaagctattgccgcagttgcaatcctcgtcaaagatgccgacaaacttactttgggccagaacctgactgttattgcaccacacgcccttgaaaacatcgttcgtcagccacctgatcgctggatgaccaatgctcgcatgacgcattatcagagcctcttgcttaccgaacgcgtgacttttgctccacctgcagccttaaaccccgcaacccttttacccgaagaaacagatgagcctgtgacgcatgactgtcatgaactcttgattgaagaaactggcgtacgcaaggacctcaccgatattccattaacaggtgaggtacttacgtggtttaccgaggggtcctcttatgtcgtcgaaggcaaacgtatggctggtgccgccgttgttgatggcacccgtactatctgggcaagcagcttacccgaaggcacgagtgctcagaaagcagagttgatggccttgacccaagccttacgccttgctgaagggaaatcgatcaatatttacaccgattcacgctatgcattcgccacggcacatgtacacggtgccatctacaaacaacgtggtttgttaacttctgctggccgcgagattaagaacaaagaagaaatcctttccttacttgaagccttacacctccccaaacgtctcgctattattcattgtccagggcatcagaaagcaaaagatcctatcagccgtgggaatcaaatggcagatcgtgtcgctaaacaggcagcccaaggcgttaacttgttgcccatgattgagacccctaaagctcca

SEQ ID NO: 388 - protein, 687 aa, synthetic construct
  REGION 1..687: note = Engineered reverse transcriptase variants
MHHHHHHGGSGVLTLQLDDEYRLYSPLVKPDQNIQFWLEQFPQAWAETGGMGLAKQVPPQVIQLKASATPVSVRQYPVSKEAEEGIRPHVQRLIQQGSLVPVQSPWNTPLLPVRKPGTNDYRPVQDLREVNKRVQDIHPTVPNPYNLLCALPPQRSWYTVLDLKDAFFCLRLHPTSQPLFAFEWRDPDTGRTGQLTWTRLPQGFKNSPTIFDEALHRDLANFRIQHPQVTLLQYVDDLLLAGATKQDCLEGTKALLLELSDLGYRVSAKKAQICRREVTYLGYSLRDGQRWLTEARKRTVVQIPAPKTAKQMREFLGTAGFCRLWIPGFATLAAPLYPLTKEKGEFSWAPEHQKAFDAIKKALLSAPALALPDVTKPFTLYVDERKGVARGVLTQTLGPWRRPVAYLSKKLDPVASGWPVCLKAIAAVAILVKDADKLTLGQNLTVIAPHALENIVRQPPDRWMTNARMTHYQSLLLTERVTFAPPAALNPATLLPEETDEPVTHDCHELLIEETGVRKDLTDIPLTGEVLTWFTEGSSYVVEGKRMAGAAVVDGTRTIWASSLPEGTSAQKAELMALTQALRLAEGKSINIYTDSRYAFATAHVHGAIYKQRGLLTSAGREIKNKEEILSLLEALHLPKRLAIIHCPGHQKAKDPISRGNQMADRVAKQAAQGVNLLPMIETPKAP

SEQ ID NO: 389 - DNA, 2061 bp, synthetic construct
  misc_feature 1..2061: note = Engineered reverse transcriptase variants
  source 1..2061: mol_type = other DNA
atgcatcaccatcaccatcatggtggtagcggagtgctgacccttcagctggatgatgaatatcgcttgtacagtccgctggtcaaaccagaccaaaacattcagttctggctcgaacagtttccgcaagcgtgggctgaaactggtggcatgggcctggccaaacaggttcctcctcaggtaatccagttaaaggcatctgccacgccggtgtcagttcgccagtatccggtgtcgaaagaagcggaggaggggattcgcccacacgtgcagcgtttgatccagcagggcatcctggtaccggttcaaagcccctggaataccccgcttttaccagtccgcaaaccgggtacatatgattaccgtcctgtgcaagacctgcgcgaggtcaattttcgtgtgcaggatatccacccaaccgttccgaacccgtataatctgttgtgcgcgttaccgccgcagcgttcctggtacacggtgctggacctgaaggacgcgttcttctgtcttcgcctccatcccaccagccagccactgtttgcctttgaatggcgcgatcctgatacgggccgtactgggcaattacattggacccgtttgccgcagggctttaagaacagtcccacgatctttgatgaggctcttcaccgcgacctcgcaaatttccgcatccaacacccacaggtaacgttactccagtatgtcgatgatcttttgttagcgggtgccaccaaacaggactgcttggaaggaacgaaagcacttctcttggaactcagtgatttaggttatcgtgtgtccgccaagaaagctcagatttgtcgccgcgaagtgacatacttaggctattcattgcgtgatggtcaacgttggcttactgaggcgcgcaagcgtaccgtcgttcaaatccccgcccctaagaccgcgaaacaaatgcgtgaatttcttggcacggcaggtttctgccgtttgtggattcctggctttgctacgttagcggcacccctctatccactcacgaaagagaagggagaattctcttgggccccagaacatcagaaagcgtttgacgccatcaagaaagcgttattaagcgctcctgctcttgcattgcccgatgtcaccaaaccattcacgctctacgtggatgaacgcaaaggcgtagcccgcggtgtgttgacacagaccttaggaccttggcgtcgtcccgtggcctacctctcgaagaaacttgacccagttgcaagtggttggcctgtctgcttgaaagctattgccgcagttgcaatcctcgtcaaagatgccgacaaacttactttgggccagaacatcactgttattgcaccacacgcccttgaaaacatcgttcgtcagccacctgatcgctggatgaccaatgctcgcatgacgcattatcagagcctcttgcttaccgaacgcgtgacttttgctccacctgcagccttaaaccccgcaacccttttacccgaagaaacagatgagcctgtgacgcatgactgtcatgagctcttgattgaagaaactggcgtacgcaaggacctcaccgatattccattaacaggtgaggtacttacgtggtttaccgaggggtcctcttatgtcgtcgaaggcaaacgtatggctggtgccgccgttgttgatggcacccgtactatctgggcaagcagcttacccgaaggcacgagtgctcagaaagcagagttgatggccttgacccaagccttacgccttgctgaagggaaatcgatcaatatttacaccgactcacgctatgcattcgccacggcacatgtacacggtgccatctacaaacaacgtggtttgttaacttctgctggccgcgagattaagaacaaagaagaaatcctttccttacttgaagccttacacctccccaaacgtctcgctattattcattgtccagggcatcagaaagcaaaagatcctatcagccgtgggaatcaaatggcagatcgtgtcgctaaacaggcagcccaaggcgttaacttgttgcccatgattgagacccctaaagctcca

SEQ ID NO: 390 - protein, 687 aa, synthetic construct
  REGION 1..687: note = Engineered reverse transcriptase variants
MHHHHHHGGSGVLTLQLDDEYRLYSPLVKPDQNIQFWLEQFPQAWAETGGMGLAKQVPPQVIQLKASATPVSVRQYPVSKEAEEGIRPHVQRLIQQGILVPVQSPWNTPLLPVRKPGTYDYRPVQDLREVNFRVQDIHPTVPNPYNLLCALPPQRSWYTVLDLKDAFFCLRLHPTSQPLFAFEWRDPDTGRTGQLHWTRLPQGFKNSPTIFDEALHRDLANFRIQHPQVTLLQYVDDLLLAGATKQDCLEGTKALLLELSDLGYRVSAKKAQICRREVTYLGYSLRDGQRWLTEARKRTVVQIPAPKTAKQMREFLGTAGFCRLWIPGFATLAAPLYPLTKEKGEFSWAPEHQKAFDAIKKALLSAPALALPDVTKPFTLYVDERKGVARGVLTQTLGPWRRPVAYLSKKLDPVASGWPVCLKAIAAVAILVKDADKLTLGQNITVIAPHALENIVRQPPDRWMTNARMTHYQSLLLTERVTFAPPAALNPATLLPEETDEPVTHDCHELLIEETGVRKDLTDIPLTGEVLTWFTEGSSYVVEGKRMAGAAVVDGTRTIWASSLPEGTSAQKAELMALTQALRLAEGKSINIYTDSRYAFATAHVHGAIYKQRGLLTSAGREIKNKEEILSLLEALHLPKRLAIIHCPGHQKAKDPISRGNQMADRVAKQAAQGVNLLPMIETPKAP

SEQ ID NO: 391 - DNA, 2061 bp, synthetic construct
  misc_feature 1..2061: note = Engineered reverse transcriptase variants
  source 1..2061: mol_type = other DNA
atgcatcaccatcaccatcatggtggtagcggagtgctgacccttcagctggatgatgaatatcgcttgtacagtccgctggtcaaaccagaccaaaacattcagttctggctcgaacagtttccgcaagcgtgggctgaaactggtggcatgggcctggccaaacaggttcctcctcaggtaatccagttaaaggcatctgccacgccggtgtcagttcgccagtatccggtgtcgaaagaagcggaggaggggattcgcccacacgtgcagcgtttgatccagcagggcatcctggtaccggttcaaagcccctggaataccccgcttttaccagtccgcaaaccgggtacaaacgattaccgtcctgtgcaagacctgcgcgaagtcaataaacgtgtgcaggatatccacccaaccgttccgaacccgtataatctgttgtgcgcgttaccgccgcagcgttcctggtacacggtgctggacctgaaggacgcgttcttctgtcttcgcctccatcccaccagccagccactgtttgcctttgaatggcgcgatcctgatacgggccgtactgggcaattaacatggacccgtttgccgcagggctttaagaacagtcccacgatctttgatgaggctcttcaccgcgacctcgcaaatttccgcatccaacacccacaggtaacgttactccagtatgtcgatgatcttttgttagcgggtgccaccaaacaggactgcttggaaggaacgaaagcacttctcttggaactcagtgatttaggttatcgtgtgtccgccaagaaagctcagatttgtcgccgcgaagtgacatacttaggctattcattgcgtgatggtcaacgttggcttactgaggcgcgcaagaaaaccgtcgttcaaatccccgcccctaagaccgcgaaacaaatgcgtgagtttcttggcacggcaggtttctgccgtttgtggattcctggctttgctacgttagcggcacccctctatccactcacgaaagagaaaggagaattctcttgggccccagaacatcagaaagcgtttgacgccatcaagaaagcgttattaagcgctcctgctcttgcattgcccgatgtcaccaaaccattcacgctctacgtggatgaacgcaaaggcgtagcccgcggtgtgttgacacagaccttaggaccttggcgtcgtcccgtggcctacctctcgaagaaacttgacccagttgcaagtggttggcctgtctgcttgaaagctattgccgcagttgcaatcctcgtcaaagatgccgacaaacttactttgggccagaacctgactgttattgcaccacacgcccttgaaaacatcgttcgtcagccacctgatcgctggatgaccaatgctcgcatgacgcattatcagagcctcttgcttaccgaacgcgtgacttttgctccacctgcagccttaaaccccgcaacccttttacccgaagaaacagatgagcctgtgacgcatgactgtcatgaactcttgattgaagaaactggcgtacgcaaggacctcaccgatattccattaacaggtgaggtacttacgtggtttaccgaggggtcctcttatgtcgtcgaaggcaaacgtatggctggtgccgccgttgttgatggcacccgtactatctgggcaagcagcttacccgaaggcacgagtgctcagaaagcagagttgatggccttgacccaagccttacgccttgctgaagggaaatcgatcaatatttacaccgattcacgctatgcattcgccacggcacatgtacacggtgccatctacaaacaacgtggtttgttaacttctgctggccgcgagattaagaacaaagaagaaatcctttccttacttgaagccttacacctccccaaacgtctcgctattattcattgtccagggcatcagaaagcaaaagatcctatcagccgtgggaatcaaatggcagatcgtgtcgctaaacaggcagcccaaggcgttaacttgttgcccatgattgagacccctaaagctcca

SEQ ID NO: 392 - protein, 687 aa, synthetic construct
  REGION 1..687: note = Engineered reverse transcriptase variants
MHHHHHHGGSGVLTLQLDDEYRLYSPLVKPDQNIQFWLEQFPQAWAETGGMGLAKQVPPQVIQLKASATPVSVRQYPVSKEAEEGIRPHVQRLIQQGILVPVQSPWNTPLLPVRKPGTNDYRPVQDLREVNKRVQDIHPTVPNPYNLLCALPPQRSWYTVLDLKDAFFCLRLHPTSQPLFAFEWRDPDTGRTGQLTWTRLPQGFKNSPTIFDEALHRDLANFRIQHPQVTLLQYVDDLLLAGATKQDCLEGTKALLLELSDLGYRVSAKKAQICRREVTYLGYSLRDGQRWLTEARKKTVVQIPAPKTAKQMREFLGTAGFCRLWIPGFATLAAPLYPLTKEKGEFSWAPEHQKAFDAIKKALLSAPALALPDVTKPFTLYVDERKGVARGVLTQTLGPWRRPVAYLSKKLDPVASGWPVCLKAIAAVAILVKDADKLTLGQNLTVIAPHALENIVRQPPDRWMTNARMTHYQSLLLTERVTFAPPAALNPATLLPEETDEPVTHDCHELLIEETGVRKDLTDIPLTGEVLTWFTEGSSYVVEGKRMAGAAVVDGTRTIWASSLPEGTSAQKAELMALTQALRLAEGKSINIYTDSRYAFATAHVHGAIYKQRGLLTSAGREIKNKEEILSLLEALHLPKRLAIIHCPGHQKAKDPISRGNQMADRVAKQAAQGVNLLPMIETPKAP

SEQ ID NO: 393 - DNA, 2061 bp, synthetic construct
  misc_feature 1..2061: note = Engineered reverse transcriptase variants
  source 1..2061: mol_type = other DNA
atgcatcaccatcaccatcatggtggtagcggagtgctgacccttcagctggatgatgaatatcgcttgtacagtccgctggtcaaaccagaccaaaacattcagttctggctcgaacagtttccgcaagcgtgggctgaaactggtggcatgggcctggccaaacaggttcctcctcaggtaatccagttaaaggcatctgccacgccggtgtcagttcgccagtatccggtgtcgaaagaagcggaggaggggattcgcccacacgtgcagcgtttgatccagcagggcattctggtaccggttcaaagcccctggaataccccgcttttaccagtccgcaaaccgggtacaaacgattaccgtcctgtgcaagacctgcgcgaagtcaataaacgtgtgcaggatatccacccaaccgttccgaacccgtataatctgttgtgcgcgttaccgccgcagcgttcctggtacacggtgctggacctgaaggacgcgttcttctgtcttcgcctccatcccaccagccagccactgtttgcctttgaatggcgcgatcctgatacgggccgtactgggcaattaacatggacccgtttgccgcagggctttaagaacagtcccacgatctttgatgaggctcttcaccgcgacctcgcaaatttccgcatccaacacccacaggtaacgttactccagtatgtcgatgatcttttgttagcgggtgccaccaaacaggactgcttggaaggaacgaaagcacttctcttggaactcagtgatttaggttatcgtgtgtccgccaagaaagctcagatttgtcgccgcgaagtgacatacttaggctattcattgcgtgatggtcaacgttggcttactgaggcgcgcaagaaaaccgtcgttcaaatccccgcccctaagaccgcgaaacagatgcgtgaatttcttggcacggcaggtttctgccgtttgtggattcctggctttgctacgttagcggcacccctctatccactcacgaaagagaaaggagaattctcttgggccccagaacatcagaaagcgtttgacgccatcaagaaagcgttattaagcgctcctgctcttgcattgcccgatgtcaccaaaccattcacgctctacgtggatgaacgcaaaggcgtagcccgcggtgtgttgacacagaccttaggaccttggcgtcgtcccgtggcctacctctcgaagaaacttgacccagttgcaagtggttggcctgtctgcttgaaagctattgccgcagttgcaatcctcgtcaaagatgccgacaaacttactttgggccagaacctgactgttattgcaccacacgcccttgaaaacatcgttcgtcagccacctgatcgctggatgaccaatgctcgcatgacgcattatcagagcctcttgcttaccgaacgcgtgacttttgctccacctgcagccttaaaccccgcaacccttttacccgaagaaacagatgagcctgtgacgcatgactgtcatcagctcttgattgaagaaactggcgtacgcaaggacctcaccgatattccattaacaggtgaggtacttacgtggtttaccgaggggtcctcttatgtcgtcgaaggcaaacgtatggctggtgccgccgttgttgatggcacccgtactatctgggcaagcagcttacccgaaggcacgagtgctcagaaagcagagttgatggccttgacccaagccttacgccttgctgaagggaaatcgatcaatatttacaccgattcacgctatgcattcgccacggcacatgtacacggtgccatctacaaacaacgtggtttgttaacttctgctggccgcgagattaagaacaaagaagaaatcctttccttacttgaagccttacacctccccaaacgtctcgctattattcattgtccagggcatcagaaagcaaaagatcctatcagccgtgggaatcaaatggcagatcgtgtcgctaaacaggcagcccaaggcgttaacttgttgcccatgattgagacccctaaagctcca

SEQ ID NO: 394 - protein, 687 aa, synthetic construct
  REGION 1..687: note = Engineered reverse transcriptase variants
MHHHHHHGGSGVLTLQLDDEYRLYSPLVKPDQNIQFWLEQFPQAWAETGGMGLAKQVPPQVIQLKASATPVSVRQYPVSKEAEEGIRPHVQRLIQQGILVPVQSPWNTPLLPVRKPGTNDYRPVQDLREVNKRVQDIHPTVPNPYNLLCALPPQRSWYTVLDLKDAFFCLRLHPTSQPLFAFEWRDPDTGRTGQLTWTRLPQGFKNSPTIFDEALHRDLANFRIQHPQVTLLQYVDDLLLAGATKQDCLEGTKALLLELSDLGYRVSAKKAQICRREVTYLGYSLRDGQRWLTEARKKTVVQIPAPKTAKQMREFLGTAGFCRLWIPGFATLAAPLYPLTKEKGEFSWAPEHQKAFDAIKKALLSAPALALPDVTKPFTLYVDERKGVARGVLTQTLGPWRRPVAYLSKKLDPVASGWPVCLKAIAAVAILVKDADKLTLGQNLTVIAPHALENIVRQPPDRWMTNARMTHYQSLLLTERVTFAPPAALNPATLLPEETDEPVTHDCHQLLIEETGVRKDLTDIPLTGEVLTWFTEGSSYVVEGKRMAGAAVVDGTRTIWASSLPEGTSAQKAELMALTQALRLAEGKSINIYTDSRYAFATAHVHGAIYKQRGLLTSAGREIKNKEEILSLLEALHLPKRLAIIHCPGHQKAKDPISRGNQMADRVAKQAAQGVNLLPMIETPKAP

SEQ ID NO: 395 - DNA, 2061 bp, synthetic construct
  misc_feature 1..2061: note = Engineered reverse transcriptase variants
  source 1..2061: mol_type = other DNA
atgcatcaccatcaccatcatggtggtagcggagtgctgacccttcagctggatgatgaatatcgcttgtacagtccgctggtcaaaccagaccaaaacattcagttctggctcgaacagtttccgcaagcgtgggctgaaactggtggcatgggcctggccaaacaggttcctcctcaggtaatccagttaaaggcatctgccacgccggtgtcagttcgccagtatccggtgtcgaaagaagcggaggaggggattcgcccacacgtgcagcgtttgatccagcagggcattctggtaccggttcaaagcccctggaataccccgcttttaccagtccgcaaaccgggtacaaacgattaccgtcctgtgcaagacctgcgcgaagtcaataaacgtgtgcaggatatccacccaaccgttccgaacccgtataatctgttgtgcgcgttaccgccgcagcgttcctggtacacggtgctggacctgaaggacgcgttcttctgtcttcgcctccatcccaccagccagccactgtttgcctttgaatggcgcgatcctgatacgggccgtactgggcaattaacatggacccgtttgccgcagggctttaagaacagtcccacgatctttgatgaggctcttcaccgcgacctcgcaaatttccgcatccaacacccacaggtaacgttactccagtatgtcgatgatcttttgttagcgggtgccaccaaacaggactgcttggaaggaacgaaagcacttctcttggaactcagtgatttaggttatcgtgtgtccgccaagaaagctcagatttgtcgccgcgaagtgacatacttaggctattcattgcgtgatggtcaacgttggcttactgaggcgcgcaagaaaaccgtcgttcaaatccccgcccctaagaccgcgaaacagatgcgtgaatttcttggcacggcaggtttctgccgtttgtggattcctggctttgctacgttagcggcacccctctatccactcacgaaagagaaaggagaattctcttgggccccagaacatcagaaagcgccggacgccatcaagaaagcgttattaagcgctcctgctcttgcattgcccgatgtcaccaaaccattcacgctctacgtggatgaacgcaaaggcgtagcccgcggtgtgttgacacagaccttaggaccttggcgtcgtcccgtggcctacctctcgaagaaacttgacccagttgcaagtggttggcctgtctgcttgaaagctattgccgcagttgcaatcctcgtcaaagatgccgacaaacttactttgggccagaacctgactgttattgcaccacacgcccttgaaaacatcgttcgtcagccacctgatcgctggatgaccaatgctcgcatgacgcattatcagagcctcttgcttaccgaacgcgtgacttttgctccacctgcagccttaaaccccgcaacccttttacccgaagaaacagatgagcctgtgacgcatgactgtcatgaactcttgattgaagaaactggcgtacgcaaggacctcaccgatattccattaacaggtgaggtacttacgtggtttaccgaggggtcctcttatgtcgtcgaaggcaaacgtatggctggtgccgccgttgttgatggcacccgtactatctgggcaagcagcttacccgaaggcacgagtgctcagaaagcagagttgatggccttgacccaagccttacgccttgctgaagggaaatcgatcaatatttacaccgattcacgctatgcattcgccacggcacatgtacacggtgccatctacaaacaacgtggtttgttaacttctgctggccgcgagattaagaacaaagaagaaatcctttccttacttgaagccttacacctccccaaacgtctcgctattattcattgtccagggcatcagaaagcaaaagatcctatcagccgtgggaatcaaatggcagatcgtgtcgctaaacaggcagcccaaggcgttaacttgttgcccatgattgagacccctaaagctcca

SEQ ID NO: 396 - protein, 687 aa, synthetic construct
  REGION 1..687: note = Engineered reverse transcriptase variants
MHHHHHHGGSGVLTLQLDDEYRLYSPLVKPDQNIQFWLEQFPQAWAETGGMGLAKQVPPQVIQLKASATPVSVRQYPVSKEAEEGIRPHVQRLIQQGILVPVQSPWNTPLLPVRKPGTNDYRPVQDLREVNKRVQDIHPTVPNPYNLLCALPPQRSWYTVLDLKDAFFCLRLHPTSQPLFAFEWRDPDTGRTGQLTWTRLPQGFKNSPTIFDEALHRDLANFRIQHPQVTLLQYVDDLLLAGATKQDCLEGTKALLLELSDLGYRVSAKKAQICRREVTYLGYSLRDGQRWLTEARKKTVVQIPAPKTAKQMREFLGTAGFCRLWIPGFATLAAPLYPLTKEKGEFSWAPEHQKAPDAIKKALLSAPALALPDVTKPFTLYVDERKGVARGVLTQTLGPWRRPVAYLSKKLDPVASGWPVCLKAIAAVAILVKDADKLTLGQNLTVIAPHALENIVRQPPDRWMTNARMTHYQSLLLTERVTFAPPAALNPATLLPEETDEPVTHDCHELLIEETGVRKDLTDIPLTGEVLTWFTEGSSYVVEGKRMAGAAVVDGTRTIWASSLPEGTSAQKAELMALTQALRLAEGKSINIYTDSRYAFATAHVHGAIYKQRGLLTSAGREIKNKEEILSLLEALHLPKRLAIIHCPGHQKAKDPISRGNQMADRVAKQAAQGVNLLPMIETPKAP

SEQ ID NO: 397 - DNA, 2061 bp, synthetic construct
  misc_feature 1..2061: note = Engineered reverse transcriptase variants
  source 1..2061: mol_type = other DNA
atgcatcaccatcaccatcatggtggtagcggagtgctgacccttcagctggatgatgaatatcgcttgtacagtccgctggtcaaaccagaccaaaacattcagttctggctcgaacagtttccgcaagcgtgggctgaaactggtggcatgggcctggccaaacaggttcctcctcaggtaatccagttaaaggcatctgccacgccggtgtcagttcgccagtatccggtgtcgaaagaagcgcaggaggggattcgcccacacgtgcagcgtttgatccagcagggcatcctggtaccggttcaaagcccctggaataccccgcttttaccagtccgcaaaccgggtacaaacgattaccgtcctgtgcaagacctgcgcgaagtcaataaacgtgtgcaggatatccacccaaccgttccgaacccgtataatctgttgtgcgcgttaccgccgcagcgttcctggtacacggtgctggacctgaaggacgcgttcttctgtcttcgcctccatcccaccagccagccactgtttgcctttgaatggcgcgatcctgatacgggccgtactgggcaattaacgtggacccgtttgccgcagggctttaagaacagtcccacgatctttgatgaggctcttcaccgcgacctcgcaaatttccgcatccaacacccacaggtaacgttactccagtatgtcgatgatcttttgttagcgggtgccaccaaacaggactgcttggaaggaacgaaagcacttctcttggaactcagtgatttaggttatcgtgtgtccgccaagaaagctcagatttgtcgccgcgaagtgacatacttaggctattcattgcgtgatggtcaacgttggcttactgaggcgcgcaagaaaaccgtcgttcaaatccccgcccctaagaccgcgaaacagatgcgtgaatttcttggcacggcaggtttctgccgtttgtggattcctggctttgctacgttagcggcacccctctatccactcacgaaagagaaaggagaattctcttgggccccagaacatcagaaagcgtttgacgccatcaagaaagcgttattaagcgctcctgctcttgcattgcccgatgtcaccaaaccattcacgctctacgtggatgaacgcaaaggcgtagcccgcggtgtgttgacacagaccttaggaccttggcgtcgtcccgtggcctacctctcgaagaaacttgacccagttgcaagtggttggcctgtctgcttgaaagctattgccgcagttgcaatcctcgtcaaagatgccgacaaacttactttgggccagaacatcactgttattgcaccacacgcccttgaaaacatcgttcgtcagccacctgatcgctggatgaccaatgctcgcatgacgcattatcagagcctcttgcttaccgaacgcgtgacttttgctccacctgcagccttaaaccccgcaacccttttacccgaagaaacagatgagcctgtgacgcatgactgtcatgaactcttgattgaagaaactggcgtacgcaaggacctcaccgatattccattaacaggtgaggtacttacgtggtttaccgaggggtcctcttatgtcgtcgaaggcaaacgtatggctggtgccgccgttgttgatggcacccgtactatctgggcaagcagcttacccgaaggcacgagtgctcagaaagcagagttgatggccttgacccaagccttacgccttgctgaagggaaatcgatcaatatttacaccgattcacgctatgcattcgccacggcacatgtacacggtgccatctacaaacaacgtggtttgttaacttctgctggccgcgagattaagaacaaagaagaaatcctttccttacttgaagccttacacctccccaaacgtctcgctattattcattgtccagggcatcagaaagcaaaagatcctatcagccgtgggaatcaaatggcagatcgtgtcgctaaacaggcagcccaaggcgttaacttgttgcccatgattgagacccccaaagctcca

SEQ ID NO: 398 - protein, 687 aa, synthetic construct
  REGION 1..687: note = Engineered reverse transcriptase variants
MHHHHHHGGSGVLTLQLDDEYRLYSPLVKPDQNIQFWLEQFPQAWAETGGMGLAKQVPPQVIQLKASATPVSVRQYPVSKEAQEGIRPHVQRLIQQGILVPVQSPWNTPLLPVRKPGTNDYRPVQDLREVNKRVQDIHPTVPNPYNLLCALPPQRSWYTVLDLKDAFFCLRLHPTSQPLFAFEWRDPDTGRTGQLTWTRLPQGFKNSPTIFDEALHRDLANFRIQHPQVTLLQYVDDLLLAGATKQDCLEGTKALLLELSDLGYRVSAKKAQICRREVTYLGYSLRDGQRWLTEARKKTVVQIPAPKTAKQMREFLGTAGFCRLWIPGFATLAAPLYPLTKEKGEFSWAPEHQKAFDAIKKALLSAPALALPDVTKPFTLYVDERKGVARGVLTQTLGPWRRPVAYLSKKLDPVASGWPVCLKAIAAVAILVKDADKLTLGQNITVIAPHALENIVRQPPDRWMTNARMTHYQSLLLTERVTFAPPAALNPATLLPEETDEPVTHDCHELLIEETGVRKDLTDIPLTGEVLTWFTEGSSYVVEGKRMAGAAVVDGTRTIWASSLPEGTSAQKAELMALTQALRLAEGKSINIYTDSRYAFATAHVHGAIYKQRGLLTSAGREIKNKEEILSLLEALHLPKRLAIIHCPGHQKAKDPISRGNQMADRVAKQAAQGVNLLPMIETPKAP

SEQ ID NO: 399 - DNA, 2061 bp, synthetic construct
  misc_feature 1..2061: note = Engineered reverse transcriptase variants
  source 1..2061: mol_type = other DNA
atgcatcaccatcaccatcatggtggtagcggagtgctgacccttcagctggatgatgaatatcgcttgtacagtccgctggtcaaaccagaccaaaacattcagttctggctcgaacagtttccgcaagcgtgggctgaaactggtggcatgggcctggccaaacaggttcctcctcaggtaatccagttaaaggcatctgccacgccggtgtcagttcgtcagtatccgctgtcgaaagaagcgcaagaggggattcgcccacacgtgcagcgtttgatccagcagggcattctggtaccggttcaaagcccctggaataccccgcttttaccagtccgcaaaccgggtacatatgattaccgtcctgtgcaagacctgcgcctggtcaattttcgtgtgcaggatatccacccaaccgttccgaacccgtataatctgttgtgcgcgttaccgccgcagcgttcctggtacacggtgctggacctgaaggacgcgttcttctgtcttcgcctccatcccaccagccagccactgtttgcctttgaatggcgcgatcctgatacgggccgtactgggcaattaacatggacccgtttgccgcagggctttaagaacagtcccacgatctttgatgaggctcttcaccgcgacctcgcaaatttccgcatccaacacccacaggtaacgttactccagtatgtcgatgatcttttgttagcgggtgccaccaaacaggactgcttggaaggaacgaaagcacttctcttggaactcagtgatttaggttatcgtgtgtccgccaagaaagctcagatttgtcgccgcgaagtgacatacttaggctattcattgcgtgatggtcaacgttggcttactgaggcgcgcaagcgtaccgtcgttcaaatccccgcccctaagaccgcgaaacagatgcgtgaatttcttggcacggcaggtttctgccgtttgtggattcctggctttgctacgttagcggcacccctctatccactcacgaaagagaaaggagaattctcttgggccccagaacatcagaaagcgtttgacgccatcaagaaagcgttattaagcgctcctgctcttgcattgcccgatgtcaccaaaccattcacgctctacgtggatgaacgcaaaggcgtagcccgcggtgtgttgacacagaccttaggaccttggcgtcgtcccgtggcctacctctcgaagaaacttgacccagttgcaagtggttggcctgtctgcttgaaagctattgccgcagttgcaatcctcgtcaaagatgccgacaaacttactttgggccagaacctgactgttattgcaccacacgcccttgaaaacatcgttcgtcagccacctgatcgctggatgaccaatgctcgcatgacgcattatcagagcctcttgcttaccgaacgcgtgacttttgctccacctgcagccttaaaccccgcaacccttttacccgaagaaacagatgagcctgtgacgcatgactgtcatgaactcttgattgaagaaactggcgtacgcaaggacctcaccgatattccattaacaggtgaggtacttacgtggtttaccgaggggtcctcttatgtcgtcgaaggcaaacgtatggctggtgccgccgttgttgatggcacccgtactatctgggcaagcagcttacccgaaggcacgagtgctcagaaagcagagttgatggccttgacccaagccttacgccttgctgaagggaaatcgatcaatatttacaccgattcacgctatgcattcgccacggcacatgtacacggtgccatctacaaacaacgtggtttgttaacttctgctggccgcgagattaagaacaaagaagaaatcctttccttacttgaagccttacacctccccaaacgtctcgctattattcattgtccagggcatcagaaagcaaaagatcctatcagccgtgggaatcaaatggcagatcgtgtcgctaaacaggcagcccaaggcgttaacttgttgcccatgattgagacccctaaagctcca

SEQ ID NO: 400 - protein, 687 aa, synthetic construct
  REGION 1..687: note = Engineered reverse transcriptase variants
MHHHHHHGGSGVLTLQLDDEYRLYSPLVKPDQNIQFWLEQFPQAWAETGGMGLAKQVPPQVIQLKASATPVSVRQYPLSKEAQEGIRPHVQRLIQQGILVPVQSPWNTPLLPVRKPGTYDYRPVQDLRLVNFRVQDIHPTVPNPYNLLCALPPQRSWYTVLDLKDAFFCLRLHPTSQPLFAFEWRDPDTGRTGQLTWTRLPQGFKNSPTIFDEALHRDLANFRIQHPQVTLLQYVDDLLLAGATKQDCLEGTKALLLELSDLGYRVSAKKAQICRREVTYLGYSLRDGQRWLTEARKRTVVQIPAPKTAKQMREFLGTAGFCRLWIPGFATLAAPLYPLTKEKGEFSWAPEHQKAFDAIKKALLSAPALALPDVTKPFTLYVDERKGVARGVLTQTLGPWRRPVAYLSKKLDPVASGWPVCLKAIAAVAILVKDADKLTLGQNLTVIAPHALENIVRQPPDRWMTNARMTHYQSLLLTERVTFAPPAALNPATLLPEETDEPVTHDCHELLIEETGVRKDLTDIPLTGEVLTWFTEGSSYVVEGKRMAGAAVVDGTRTIWASSLPEGTSAQKAELMALTQALRLAEGKSINIYTDSRYAFATAHVHGAIYKQRGLLTSAGREIKNKEEILSLLEALHLPKRLAIIHCPGHQKAKDPISRGNQMADRVAKQAAQGVNLLPMIETPKAP

SEQ ID NO: 401 - DNA, 2061 bp, synthetic construct
  misc_feature 1..2061: note = Engineered reverse transcriptase variants
  source 1..2061: mol_type = other DNA
atgcatcaccatcaccatcatggtggtagcggagtgctgacccttcagctggatgatgaatatcgcttgtacagtccgctggtcaaaccagaccaaaacattcagttctggctcgaacagtttccgcaagcgtgggctgaaactggtggcatgggcctggccaaacaggttcctcctcaggtaatccagttaaaggcatctgccacgccggtgtcagttcgtcagtatccgctgtcgaaagaagcgcaagaggggattcgcccacatgtgcagcgtttgatccagcagggcattctggtaccggttcaaagcccctggaataccccgcttttaccagtccgcaaaccgggtacaaacgattaccgtcctgtgcaagacctgcgcgaagtcaataaacgtgtgcaggatatccacccaaccgttccgaacccgtataatctgttgtgcgcgttaccgccgcagcgttcctggtacacggtgctggacctgaaggacgcgttcttctgtcttcgcctccatcccaccagccagctgctgtttgcctttgaatggcgcgatcctgatacgggccgtactgggcaattaacatggacccgtttgccgcagggctttaagaacagtcccacgatctttgatgaggctcttcaccgcgacctcgcaaatttccgcatccaacacccacaggtaacgttactccagtatgtcgatgatcttttgttagcgggtgccaccaaacaggactgcttggaaggaacgaaagcacttctcttggaactcagtgatttaggttatcgtgtgtccgccaagaaagctcagatttgtcgccgcgaagtgacatacttaggctattcattgcgtgatggtcaacgttggcttactgaggcgcgcaaaaagaccgtcgttcaagggcccgctcctaagaccgcgaaacagatgcgtgaatttcttggcacggcaggtttctgccgtttgtggattcctggctttgctgaattagcggcacccctctatgtactcacgaaagagaaaggagaattctcttgggccccagaacatcagaaagcgtttgacgccatcaagaaagcgttattaagcgctcctgctcttgcattgcccgatgtcaccaaaccattcacgctctacgtggatgaacgcaaaggcgtagcccgcggtgtgttgacacagaccttaggaccttggcgtcgtcccgtggcctacctctcgaagaaacttgacccagttgcaagtggttggcctgtctgcttgaaagctattgccgcagttgcaatcctcgtcaaagatgccgacaaacttactttgggccagaacctgactgttattgcaccacacgcccttgaaaacatcgttcgtcagccacctgatcgctggatgaccaatgctcgcatgacgcattatcagagcctcttgcttaccgaacgcgtgacttttgctccacctgcagccttaaaccccgcaacccttttacccgaagaaacagatgagcctgtgacgcatgactgtctggaactcttgattgaagaaactggcgtacgcaaggacctcaccgatattccattaacaggtgaggtacttacgtggtttaccgaggggtcctcttatgtcgtcgaaggcaaacgtatggctggtgccgccgttgttgatggcacccgtactatctgggcaagcagcttacccgaaggcacgagtgctcagaaagcagagttgatggccttgacccaagccttacgccttgctgaagggaaatcgatcaatatttacaccgattcacgctatgcattcgccacggcacatgtacacggtgccatctacaaacaacgtggtttgttaacttctgctggccgcgagattaagaacaaagaagaaatcctttccttacttgaagccttacacctccccaaacgtctcgctattattcattgtccagggcatcagaaagcaaaagatcctatcagccgtgggaatcaaatggcagatcgtgtcgctaaacaggcagcccaaggcgttaacttgttgcccatgattgagacccctaaagctcca

SEQ ID NO: 402 - protein, 687 aa, synthetic construct
  REGION 1..687: note = Engineered reverse transcriptase variants
MHHHHHHGGSGVLTLQLDDEYRLYSPLVKPDQNIQFWLEQFPQAWAETGGMGLAKQVPPQVIQLKASATPVSVRQYPLSKEAQEGIRPHVQRLIQQGILVPVQSPWNTPLLPVRKPGTNDYRPVQDLREVNKRVQDIHPTVPNPYNLLCALPPQRSWYTVLDLKDAFFCLRLHPTSQLLFAFEWRDPDTGRTGQLTWTRLPQGFKNSPTIFDEALHRDLANFRIQHPQVTLLQYVDDLLLAGATKQDCLEGTKALLLELSDLGYRVSAKKAQICRREVTYLGYSLRDGQRWLTEARKKTVVQGPAPKTAKQMREFLGTAGFCRLWIPGFAELAAPLYVLTKEKGEFSWAPEHQKAFDAIKKALLSAPALALPDVTKPFTLYVDERKGVARGVLTQTLGPWRRPVAYLSKKLDPVASGWPVCLKAIAAVAILVKDADKLTLGQNLTVIAPHALENIVRQPPDRWMTNARMTHYQSLLLTERVTFAPPAALNPATLLPEETDEPVTHDCLELLIEETGVRKDLTDIPLTGEVLTWFTEGSSYVVEGKRMAGAAVVDGTRTIWASSLPEGTSAQKAELMALTQALRLAEGKSINIYTDSRYAFATAHVHGAIYKQRGLLTSAGREIKNKEEILSLLEALHLPKRLAIIHCPGHQKAKDPISRGNQMADRVAKQAAQGVNLLPMIETPKAP

SEQ ID NO: 403 - DNA, 2061 bp, synthetic construct
  misc_feature 1..2061: note = Engineered reverse transcriptase variants
  source 1..2061: mol_type = other DNA
atgcatcaccatcaccatcatggtggtagcggagtgctgacccttcagctggatgatgaatatcgcttgtacagtccgctggtcaaaccagaccaaaacattcagttctggctcgaacagtttccgcaagcgtgggctgaaactggtggcatgggcctggccaaacaggttcctcctcaggtaatccagttaaaggcatctgccacgccggtgtcagttcgtcagtatccgctgtcgaaagaagcgcaggaggggattcgcccacacgtgcagcgtttgatccagcagggcattctggtaccggttcaaagcccctggaataccccgcttttaccagtccgcaaaccgggtacaaacgattaccgtcctgtgcaagacctgcgcgaagtcaataaacgtgtgcaggatatccacccaaccgttccgaacccgtataatctgttgtgcgcgttaccgccgcagcgttcctggtacacggtgctggacctgaaggacgcgttcttctgtcttcgcctccatcccaccagccagccactgtttgcctttgaatggcgcgatcctgatacgggccgtactgggcaattaacgtggacccgtttgccgcagggctttaagaacagtcccacgatctttgatgaggctcttcaccgcgacctcgcaaatttccgcatccaacacccacaggtaacgttactccagtatgtcgatgatcttttgttagcgggtgccaccaaacaggactgcttggaaggaacgaaagcacttctcttggaactcagtgatttaggttatcgtgtgtccgccaagaaagctcagatttgtcgccgcgaagtgacatacttaggctattcattgcgtgatggtcaacgttggcttactgaggcgcgcaagcgtaccgtcgttcaaatccccgcccctaagaccgcgaaaattatgcgtatgtttcttggcacggcaggtttctgccgtttgtggattcctggctttgctacgttagcggcacccctctatccactcacgaaagagaagggagaattctcttgggccccagaacatcagaaagcgtttgacgccatcaagaaagcgttattaagcgctcctgctcttgcattgcccgatgtcaccaaaccattcacgctctacgtggatgaacgcaaaggcgtagcccgcggtgtgttgacacagaccttaggaccttggcgtcgtcccgtggcctacctctcgaagaaacttgacccagttgcaagtggttggcctgtctgcttgaaagctattgccgcagttgcaatcctcgtcaaagatgccgacaaacttactttgggccagaacctgactgttattgcaccacacgcccttgaaaacatcgttcgtcagccacctgatcgctggatgaccaatgctcgcatgacgcattatcagagcctcttgcttaccgaacgcgtgacttttgctccacctgcagccttaaaccccgcaacccttttacccgaagaaacagatgagcctgtgacgcatgactgtcatgaactcttgattgaagaaactggcgtacgcaaggacctcaccgatattccattaacaggtgaggtacttacgtggtttaccgaggggtcctcttatgtcgtcgaaggcaaacgtatggctggtgccgccgttgttgatggcacccgtactatctgggcaagcagcttacccgaaggcacgagtgctcagaaagcagagttgatggccttgacccaagccttacgccttgctgaagggaaatcgatcaatatttacaccgattcacgctatgcattcgccacggcacatgtacacggtgccatctacaaacaacgtggtttgttaacttctgctggccgcgagattaagaacaaagaagaaatcctttccttacttgaagccttacacctccccaaacgtctcgctattattcattgtccagggcatcagaaagcaaaagatcctatcagccgtgggaatcaaatggcagatcgtgtcgctaaacaggcagcccaaggcgttaacttgttgcccatgattgagacccctaaagctcca

SEQ ID NO: 404 - protein, 687 aa, synthetic construct
  REGION 1..687: note = Engineered reverse transcriptase variants
MHHHHHHGGSGVLTLQLDDEYRLYSPLVKPDQNIQFWLEQFPQAWAETGGMGLAKQVPPQVIQLKASATPVSVRQYPLSKEAQEGIRPHVQRLIQQGILVPVQSPWNTPLLPVRKPGTNDYRPVQDLREVNKRVQDIHPTVPNPYNLLCALPPQRSWYTVLDLKDAFFCLRLHPTSQPLFAFEWRDPDTGRTGQLTWTRLPQGFKNSPTIFDEALHRDLANFRIQHPQVTLLQYVDDLLLAGATKQDCLEGTKALLLELSDLGYRVSAKKAQICRREVTYLGYSLRDGQRWLTEARKRTVVQIPAPKTAKIMRMFLGTAGFCRLWIPGFATLAAPLYPLTKEKGEFSWAPEHQKAFDAIKKALLSAPALALPDVTKPFTLYVDERKGVARGVLTQTLGPWRRPVAYLSKKLDPVASGWPVCLKAIAAVAILVKDADKLTLGQNLTVIAPHALENIVRQPPDRWMTNARMTHYQSLLLTERVTFAPPAALNPATLLPEETDEPVTHDCHELLIEETGVRKDLTDIPLTGEVLTWFTEGSSYVVEGKRMAGAAVVDGTRTIWASSLPEGTSAQKAELMALTQALRLAEGKSINIYTDSRYAFATAHVHGAIYKQRGLLTSAGREIKNKEEILSLLEALHLPKRLAIIHCPGHQKAKDPISRGNQMADRVAKQAAQGVNLLPMIETPKAP

SEQ ID NO: 405 - DNA, 2061 bp, synthetic construct
  misc_feature 1..2061: note = Engineered reverse transcriptase variants
  source 1..2061: mol_type = other DNA
atgcatcaccatcaccatcatggtggtagcggagtgctgacccttcagctggatgatgaatatcgcttgtacagtccgctggtcaaaccagaccaaaacattcagttctggctcgaacagtttccgcaagcgtgggctgaaactggtggcatgggcctggccaaacaggttcctcctcaggtaatcctgttaaaggcatctgccacgccggtgtcagttcgtcagtatccgctgtcgaaagaagcgcaagaggggattcgcccacatgtgcagcgtttgatccagcagggcattctggtaccggttcaaagcccctggaataccccgcttttaccagtccgcaaaccgggtacaaacgattaccgtcctgtgcaagacctgcgcgaagtcaataaacgtgtgcaggatatccacccaaccgttccgaacccgtataatctgttgtgcgcgttaccgccgcagcgttcctggtacacggtgctggacctgaaggacgcgttcttctgtcttcgcctccatcccaccagccagccactgtttgcctttgaatggcgcgatcctgatacgggccgtactgggcaattaacatggacccgtttgccgcagggctttaagaacagtcccacgatctttgatgaggctcttcaccgcgacctcgcaaatttccgcatccaacacccacaggtaacgttactccagtatgtcgatgatcttttgttagcgggtgccaccaaacaggactgcttggaaggaacgaaagcacttctcttggaactcagcgatttaggttatcgtgtgtccgccaagaaagctcagatttgtcgccgcgaagtgacatacttaggctattcattgcgtgatggtcaacgttggcttactgaggcgcgctggcgtaccgtcgttcaagggccccctcctaagaccgcgaaacagatgcgtgaatttcttggcacggcaggtttctgccgtttgtggattcctggctttgctacgttagcggcacccctctatccactcacgaaagagaaaggagaattctcttgggccccagaacatcagaaagcgtttgacgccatcaagaaagcgttattaagcgctcctgctcttgcattgcccgatgtcaccaaaccattcacgctctacgtggatgaacgcaaaggcgtagcccgcggtgtgttgacacagaccttaggaccttggcgtcgtcccgtggcctacctctcgaagaaacttgacccagttgcaagtggttggcctgtctgcttgaaagctattgccgcagttgcaatcctcgtcaaagatgccgacaaacttactttgggccagaacatcactgttattgcaccacacgcccttgaaaacatcgttcgtcagccacctgatcgctggatgaccaatgctcgcatgacgcattatcagagcctcttgcttaccgaacgcgtgacttttgctccacctgcagccttaaaccccgcaacccttttacccgaagaaacagatgagcctgtgacgcatgactgtcatgaactcttgattgaagaaactggcgtacgcaaggacctcaccgatattccattaacaggtgaggtacttacgtggtttaccgaggggtcctcttatgtcgtcgaaggcaaacgtatggctggtgccgccgttgttgatggcacccgtactatctgggcaagcagcttacccgaaggcacgagtgctcagaaagcagagttgatggccttgacccaagccttacgccttgctgaagggaaatcgatcaatatttacaccgattcacgctatgcattcgccacggcacatgtacacggtgccatctacaaacaacgtggtttgttaacttctgctggccgcgagattaagaacaaagaagaaatcctttccttacttgaagccttacacctccccaaacgtctcgctattattcattgtccagggcatcagaaagcaaaagatcctatcagccgtgggaatcaaatggcagatcgtgtcgctaaacaggcagcccaaggcgttaacttgttgcccatgattgagacccctaaagctcca

SEQ ID NO: 406 - protein, 687 aa, synthetic construct
  REGION 1..687: note = Engineered reverse transcriptase variants
MHHHHHHGGSGVLTLQLDDEYRLYSPLVKPDQNIQFWLEQFPQAWAETGGMGLAKQVPPQVILLKASATPVSVRQYPLSKEAQEGIRPHVQRLIQQGILVPVQSPWNTPLLPVRKPGTNDYRPVQDLREVNKRVQDIHPTVPNPYNLLCALPPQRSWYTVLDLKDAFFCLRLHPTSQPLFAFEWRDPDTGRTGQLTWTRLPQGFKNSPTIFDEALHRDLANFRIQHPQVTLLQYVDDLLLAGATKQDCLEGTKALLLELSDLGYRVSAKKAQICRREVTYLGYSLRDGQRWLTEARWRTVVQGPPPKTAKQMREFLGTAGFCRLWIPGFATLAAPLYPLTKEKGEFSWAPEHQKAFDAIKKALLSAPALALPDVTKPFTLYVDERKGVARGVLTQTLGPWRRPVAYLSKKLDPVASGWPVCLKAIAAVAILVKDADKLTLGQNITVIAPHALENIVRQPPDRWMTNARMTHYQSLLLTERVTFAPPAALNPATLLPEETDEPVTHDCHELLIEETGVRKDLTDIPLTGEVLTWFTEGSSYVVEGKRMAGAAVVDGTRTIWASSLPEGTSAQKAELMALTQALRLAEGKSINIYTDSRYAFATAHVHGAIYKQRGLLTSAGREIKNKEEILSLLEALHLPKRLAIIHCPGHQKAKDPISRGNQMADRVAKQAAQGVNLLPMIETPKAP

SEQ ID NO: 407 - DNA, 2061 bp, synthetic construct
  misc_feature 1..2061: note = Engineered reverse transcriptase variants
  source 1..2061: mol_type = other DNA
atgcatcaccatcaccatcatggtggtagcggagtgctgacccttcagctggatgatgaatatcgcttgtacagtccgctggtcaaaccagaccaaaacattcagttctggctcgaacagtttccgcaagcgtgggctgaaactggtggcatgggcctggccaaacaggttcctcctcaggtaatcctgttaaaggcatctgccacgccggtgtcagttcgtcagtatccgctgtcgaaagaagcgcaagaggggattcgcccacatgtgcagcgtttgatccagcagggcattctggtaccggttcaaagcccctggaataccccgcttttaccagtccgcaaaccgggtacaaacgattaccgtcctgtgcaagacctgcgcgaagtcaataaacgtgtgcaggatatccacccaaccgttccgaacccgtataatctgttgtgcgcgttaccgccgcagcgttcctggtacacggtgctggacctgaaggacgcgttcttctgtcttcgcctccatcccaccagccagctgctgtttgcctttgaatggcgcgatcctgatacgggccgtactgggcaattaacatggacccgtttgccgcagggctttaagaacagtcccgccatctttgatgaggctcttcaccgcgacctcgcaaatttccgcatccaacacccacaggtaacgttactccagtatgtcgatgatcttttgttagcgggtgccaccaaacaggactgcttggaaggaacgaaagcacttctcttggaactcggcgatttaggttatcgtgtgtccgccaagaaagctcagatttgtcgccgcgaagtgacatacttaggctattcattgcgtgatggtcaacgttggcttactgaggcgcgcaagcgtaccgttgttcaaatccccgcccctaagaccgcgaaacagatgcgtgaatttcttggcacggcaggtttctgccgtttgtggattcctggctttgctacgttagcggcacccctctatccgctcacgaaagagaaaggagaattctcttgggccccagaacatcagaaagcgtttgacgccatcaagaaagcgttattaagcgctcctgctcttgcattgcccgatgtcaccaaaccattcacgctctacgtggatgaacgcaaaggcgtagcccgcggtgtgttgacacagaccttaggaccttggcgtcgtcccgtggcctacctctcgaagaaacttgacccagttgcaagtggttggcctgtctgcttgaaagctattgccgcagttgcaatcctcgtcaaagatgccgacaaacttactttgggccagaacctgactgttattgcaccacacgcccttgaaaacatcgttcgtcagccacctgatcgctggatgaccaatgctcgcatgacgcattatcagagcctcttgcttaccgaacgcgtgacttttgctccacctgcagccttaaaccccgcaacccttttacccgaagaaacagatgagcctgtgacgcatgactgtcatgaactcttgattgaagaaactggcgtacgcaaggacctcaccgatattccattaacaggtgaggtacttacgtggtttaccgaggggtcctcttatgtcgtcgaaggcaaacgtatggctggtgccgccgttgttgatggcacccgtactatctgggcaagcagcttacccgaaggcacgagtgctcagaaagcacagttgatggccttgacccaagccttacgccttgctgaagggaaatcgatcaatatttacaccgattcacgctatgcattcgccacggcacatgtacacggtgccatctacaaacaacgtggtttgttaacttctgctggccgcgagattaagaacaaagaagaaatcctttccttacttgaagccttacacctccccaaacgtctcgctattattcattgtccagggcatcagaaagcaaaagatcctatcagccgtgggaatcaaatggcagatcgtgtcgctaaacaggcagcccaaggcgttaacttgttgcccatgattgagacccctaaagctcca

SEQ ID NO: 408 - protein, 687 aa, synthetic construct
  REGION 1..687: note = Engineered reverse transcriptase variants
MHHHHHHGGSGVLTLQLDDEYRLYSPLVKPDQNIQFWLEQFPQAWAETGGMGLAKQVPPQVILLKASATPVSVRQYPLSKEAQEGIRPHVQRLIQQGILVPVQSPWNTPLLPVRKPGTNDYRPVQDLREVNKRVQDIHPTVPNPYNLLCALPPQRSWYTVLDLKDAFFCLRLHPTSQLLFAFEWRDPDTGRTGQLTWTRLPQGFKNSPAIFDEALHRDLANFRIQHPQVTLLQYVDDLLLAGATKQDCLEGTKALLLELGDLGYRVSAKKAQICRREVTYLGYSLRDGQRWLTEARKRTVVQIPAPKTAKQMREFLGTAGFCRLWIPGFATLAAPLYPLTKEKGEFSWAPEHQKAFDAIKKALLSAPALALPDVTKPFTLYVDERKGVARGVLTQTLGPWRRPVAYLSKKLDPVASGWPVCLKAIAAVAILVKDADKLTLGQNLTVIAPHALENIVRQPPDRWMTNARMTHYQSLLLTERVTFAPPAALNPATLLPEETDEPVTHDCHELLIEETGVRKDLTDIPLTGEVLTWFTEGSSYVVEGKRMAGAAVVDGTRTIWASSLPEGTSAQKAQLMALTQALRLAEGKSINIYTDSRYAFATAHVHGAIYKQRGLLTSAGREIKNKEEILSLLEALHLPKRLAIIHCPGHQKAKDPISRGNQMADRVAKQAAQGVNLLPMIETPKAP

SEQ ID NO: 409 - DNA, 2061 bp, synthetic construct
  misc_feature 1..2061: note = Engineered reverse transcriptase variants
  source 1..2061: mol_type = other DNA
atgcatcaccatcaccatcatggtggtagcggagtgctgacccttcagctggatgatgaatatcgcttgtacagtccgctggtcaaaccagaccaaaacattcagttctggctcgaacagtttccgcaagcgtgggctgaaactggtggcatgggcctggccaaacaggttcctcctcaggtaatcctgttaaaggcatctgccacgccggtgtcagttcgtcagtatccgctgtcgaaagaagcgcaagaggggattcgcccacatgtgcagcgtttgatccagcagggcattctggtaccggttcaaagcccctggaataccccgcttttaccagtccgcaaaccgggtacaaacgattaccgtcctgtgcaagacctgcgcgaagtcaataaacgtgtgcaggatatccacccaaccgttccgaacccgtataatctgttgtgcgcgttaccgccgcagcgttcctggtacacggtgctggacctgaaggacgcgttcttctgtcttcgcctccatcccaccagccagccactgtttgcctttgaatggcgcgatcctgatacgggccgtactgggcaattaacatggacccgtttgccgcagggctttaagaacagtcccaccatctttgatgaggctcttcaccgcgacctcgcaaatttccgcatccaacacccacaggtaacgttactccagtatgtcgatgatcttttgttagcgggtgccaccaaacaggactgcttggaaggaacgaaagcacttctcttggaactcagcgatttaggttatcgtgtgtccgccaagaaagctcagatttgtcgccgcgaagtgacatacttaggctattcattgcgtgatggtcaacgttggcttactgaggcgcgcaagcgtaccattgttcaaatccccgcccctaagaccgcgaaacagatgcgtgaatttcttggcacggcaggtttctgccgtttgtggattcctggctttgctacgttagcggcacccctctatgtactcacgaaagagaaaggagaattctcttgggccccagaacatcagaaagcgtttgatgccatcaagaaagcgttattaagcgctcctgctcttgcattgcccgatgtcaccaaaccattcacgctctacgtggatgaacgcaaaggcgtagcccgcggtgtgttgacacagaccttaggaccttggcgtcgtcccgtggcctacctctcgaagaaacttgacccagttgcaagtggttggcctgtctgcttgaaagctattgccgcagttgcaatcctcgtcaaagatgccgacaaacttactttgggccagaacctgactgttattgcaccacacgcccttgaaaacatcgttcgtcagccacctgatcgctggatgaccaatgctcgcatgacgcattatcagagcctcttgcttaccgaacgcgtgacttttgctccacctgcagccttaaaccccgcaacccttttacccgaagaaacagatgagcctgtgacgcatgactgtcatgaactcttgattgaagaaactggcgtacgcaaggacctcaccgatattccattaacaggtgaggtacttacgtggtttaccgaggggtcctcttatgtcgtcgaaggcaaacgtatggctggtgccgccgttgttgatggcacccgtactatctgggcaagcagcttacccgaaggcacgagtgctcagaaagcagagttgatggccttgacccaagccttacgccttgctgaagggaaatcgatcaatatttacaccgattcacgctatgcattcgccacggcacatgtacacggtgccatctacaaacaacgtggtttgttaacttctgctggccgcgagattaagaacaaagaagaaatcctttccttacttgaagccttacacctccccaaacgtctcgctattattcattgtccagggcatcagaaagcaaaagatcctatcagccgtgggaatcaaatggcagatcgtgtcgctaaacaggcagcccaaggcgttaacttgttgcccatgattgagacccctaaagctcca

SEQ ID NO: 410 - protein, 687 aa, synthetic construct
  REGION 1..687: note = Engineered reverse transcriptase variants
MHHHHHHGGSGVLTLQLDDEYRLYSPLVKPDQNIQFWLEQFPQAWAETGGMGLAKQVPPQVILLKASATPVSVRQYPLSKEAQEGIRPHVQRLIQQGILVPVQSPWNTPLLPVRKPGTNDYRPVQDLREVNKRVQDIHPTVPNPYNLLCALPPQRSWYTVLDLKDAFFCLRLHPTSQPLFAFEWRDPDTGRTGQLTWTRLPQGFKNSPTIFDEALHRDLANFRIQHPQVTLLQYVDDLLLAGATKQDCLEGTKALLLELSDLGYRVSAKKAQICRREVTYLGYSLRDGQRWLTEARKRTIVQIPAPKTAKQMREFLGTAGFCRLWIPGFATLAAPLYVLTKEKGEFSWAPEHQKAFDAIKKALLSAPALALPDVTKPFTLYVDERKGVARGVLTQTLGPWRRPVAYLSKKLDPVASGWPVCLKAIAAVAILVKDADKLTLGQNLTVIAPHALENIVRQPPDRWMTNARMTHYQSLLLTERVTFAPPAALNPATLLPEETDEPVTHDCHELLIEETGVRKDLTDIPLTGEVLTWFTEGSSYVVEGKRMAGAAVVDGTRTIWASSLPEGTSAQKAELMALTQALRLAEGKSINIYTDSRYAFATAHVHGAIYKQRGLLTSAGREIKNKEEILSLLEALHLPKRLAIIHCPGHQKAKDPISRGNQMADRVAKQAAQGVNLLPMIETPKAP

SEQ ID NO: 411 - DNA, 2061 bp, synthetic construct
  misc_feature 1..2061: note = Engineered reverse transcriptase variants
  source 1..2061: mol_type = other DNA
atgcatcaccatcaccatcatggtggtagcggagtgctgacccttcagctggatgatgaatatcgcttgtacagtccgctggtcaaaccagaccaaaacattcagttctggctcgaacagtttccgcaagcgtgggctgaaactggtggcatgggcctggccaaacaggttcctcctcaggtaatccagttaaaggcatctgccacgccggtgagtgttcgtcagtatccgctgtcgaaagaagcggcagaggggattcgcccacacgtgcagcgtttgatccagcagggcattctggtaccggttcaaagcccctggaataccccgcttttaccagtccgcaaaccgggtacaaacgattaccgtcctgtgcaagacctgcgcgaagtcaataaacgtgtgcaggatatccacccaaccgttccgaacccgtataatctgttgtgcgcgttaccgccgcagcgttcctggtacacggtgctggacctgaaggacgcgttcttctgtcttcgcctccatcccaccagccagccactgtttgcctttgaatggcgcgatcctgatacgggccgtactgggcaattaacatggacccgtttgccgcagggctttaagaacagtcccacgatctttgatgaggctcttcaccgcgacctcgcaaatttccgcatccaacacccacaggtaacgttactccagtatgtcgatgatcttttgttagcgggtgccaccaaacaggactgcttggaaggaacgaaagcacttctcttggaactcagtgatttaggttatcgtgtgtccgccaagaaagctcagatttgtcgccgcgaagtgacatacttaggctattcattgcgtgatggtcaacgttggcttactcaggcgcgcaagcgtaccgtcgttcaaatccccgcccctaagaccgcgaaacagatgcgtgaatttcttggcacggcaggtttctgccgtttgtggattcctggcttcgctacgttagcggcacccctctatccactcacgaaagagaaaggagaattctcttgggccccagaacatcagaaagcgtttgacgccatcaagaaagcgttattaagcgctcctgctcttgcattgcccgatgtcaccaaaccattcacgctctacgtggatgaacgcaaaggcgtagcccgcggtgtgttgacacagaccttaggaccttggcgtcgtcccgtggcctacctctcgaagaaacttgacccagttgcaagtggttggcctgtctgcttgaaagctattgccgcagttgcaatcctcgtcaaagatgccgacaaacttactttgggccagaacctgactgttattgcaccacacgcccttgaaaacatcgttcgtcagccacctgatcgctggatgaccaatgctcgcatgacgcattatcagagcctcttgcttaccgaacgcgtgacttttgctccacctgcagccttaaaccccgcaacccttttacccgaagaaacagatgagcctgtgacgcatgactgtcatgagctcttgattgaagaaactggcgtacgcaaggacctcaccgatattccattaacaggtgaggtacttacgtggtttaccgaggggtcctcttatgtcgtcgaaggcaaacgtatggctggtgccgccgttgttgatggcacccgtactatctgggcaagcagcttacccgaaggcacgagtgctcagaaagcagaattgatggccttgacccaagccttacgccttgctgaagggaaatcgatcaatatttacaccgattcacgctatgcattcgccacggcacatgtacacggtgccatctacaaacaacgtggtttgttaacttctgctggccgcgagattaagaacaaagaagaaatcctttccttacttgaagccttacacctccccaaacgtctcgctattattcattgtccagggcatcagaaagcaaaagatcctatcagccgtgggaatcaaatggcagatcgtgtcgctaaacaggcagcccaaggcgttaacttgttgcccatgattgagacccctaaagctcca

SEQ ID NO: 412 - protein, 687 aa, synthetic construct
  REGION 1..687: note = Engineered reverse transcriptase variants
MHHHHHHGGSGVLTLQLDDEYRLYSPLVKPDQNIQFWLEQFPQAWAETGGMGLAKQVPPQVIQLKASATPVSVRQYPLSKEAAEGIRPHVQRLIQQGILVPVQSPWNTPLLPVRKPGTNDYRPVQDLREVNKRVQDIHPTVPNPYNLLCALPPQRSWYTVLDLKDAFFCLRLHPTSQPLFAFEWRDPDTGRTGQLTWTRLPQGFKNSPTIFDEALHRDLANFRIQHPQVTLLQYVDDLLLAGATKQDCLEGTKALLLELSDLGYRVSAKKAQICRREVTYLGYSLRDGQRWLTQARKRTVVQIPAPKTAKQMREFLGTAGFCRLWIPGFATLAAPLYPLTKEKGEFSWAPEHQKAFDAIKKALLSAPALALPDVTKPFTLYVDERKGVARGVLTQTLGPWRRPVAYLSKKLDPVASGWPVCLKAIAAVAILVKDADKLTLGQNLTVIAPHALENIVRQPPDRWMTNARMTHYQSLLLTERVTFAPPAALNPATLLPEETDEPVTHDCHELLIEETGVRKDLTDIPLTGEVLTWFTEGSSYVVEGKRMAGAAVVDGTRTIWASSLPEGTSAQKAELMALTQALRLAEGKSINIYTDSRYAFATAHVHGAIYKQRGLLTSAGREIKNKEEILSLLEALHLPKRLAIIHCPGHQKAKDPISRGNQMADRVAKQAAQGVNLLPMIETPKAP

SEQ ID NO: 413 - DNA, 2061 bp, synthetic construct
  misc_feature 1..2061: note = Engineered reverse transcriptase variants
  source 1..2061: mol_type = other DNA
atgcatcaccatcaccatcatggtggtagcggagtgctgacccttcagctggatgatgaatatcgcttgtacagtccgctggtcaaaccagaccaaaacattcagttctggctcgaacagtttccgcaagcgtgggctgaaactggtggcatgggcctggccaaacaggttcctcctcaggtaatccagttaaaggcatctgccacgccggtgtcagttcgtcagtatccgctgtcgaaagaagcggcagaggggattcgcccacacgtgcagactttgatccagcagggcattctggtaccggttcaaagcccctggaataccccgcttttaccagtccgcaaaccgggtacaaacgattaccgtcctgtgcaagacctgcgcgaagtcaataaacgtgtgcaggatatccacccaaccgttccgaacccgtataatctgttgtgcgcgttaccgccgcagcgttcctggtacacggtgctggacctgaaggacgcgttcttctgtcttcgcctccatcccaccagccagccactgtttgcctttgaatggcgcgatcctgatacgggccgtactgggcaattaacatggacccgtttgccgcagggctttaagaacagtcccacgatctttgatgaggctcttcaccgcgacctcgcaaatttccgcatccaacacccacaggtaacgttactccagtatgtcgatgatcttttgttagcgggtgccaccaaacaggactgcttggaaggaacgaaagcacttctcttggaactcagtgatttaggttatcgtgtgtccgccaagaaagctcagatttgtcgccgcgaagtgacatacttaggctattcattgcgtgatggtcaacgttggcttactgaggcgcgcaagaagaccgtcgttcaaatccccgcccctaagaccgcgaaacagatgcgtgaatttcttggcacggcaggtttctgccgtttgtggattcctggctttgctacgttagcggcacccctctatccactcacgaaagaggccggagaattctcttgggccccagaacatcagaaagcgtttgacgccatcaagaaagcgttattaagcgctcctgctcttgcattgcccgatgtcaccaaaccattcacgctctacgtggatgaacgcaaaggcgtagcccgcggtgtgttgacacagaccttaggaccttggcgtcgtcccgtggcctacctctcgaagaaacttgacccagttgcaagtggttggcctgtctgcttgaaagctattgccgcagttgcaatcctcgtcaaagatgccgacaaacttactttgggccagaacctgactgttattgcaccacacgcccttgaaaacatcgttcgtcagccacctgatcgctggatgaccaatgctcgcatgacgcattatcagagcctcttgcttaccgaacgcgtgacttttgctccacctgcagccttaaaccccgcaacccttttacccgaagaaacagatgagcctgtgacgcatgactgtcatgagctcttgattgaagaaactggcgtacgcaaggacctcaccgatattccattaacaggtgaggtacttacgtggtttaccgaggggtcctcttatgtcgtcgaaggcaaacgtatggctggtgccgccgttgttgatggcacccgtactatctgggcaagcagcttacccgaaggcacgagtgctcagaaagcacaattgatggccttgacccaagccttacgccttgctgaagggaaatcgatcaatatttacaccgattcacgctatgcattcgccacggcacatgtacacggtgccatctacaaacaacgtggtttgttaacttctgctggccgcgagattaagaacaaagaagaaatcctttccttacttgaagccttacacctccccaaacgtctcgctattattcattgtccagggcatcagaaagcaaaagatcctatcagccgtgggaatcaaatggcagatcgtgtcgctaaacaggcagcccaaggcgttaacttgttgcccatgattgagacccctaaagctcca

SEQ ID NO: 414 - protein, 687 aa, synthetic construct
  REGION 1..687: note = Engineered reverse transcriptase variants
MHHHHHHGGSGVLTLQLDDEYRLYSPLVKPDQNIQFWLEQFPQAWAETGGMGLAKQVPPQVIQLKASATPVSVRQYPLSKEAAEGIRPHVQTLIQQGILVPVQSPWNTPLLPVRKPGTNDYRPVQDLREVNKRVQDIHPTVPNPYNLLCALPPQRSWYTVLDLKDAFFCLRLHPTSQPLFAFEWRDPDTGRTGQLTWTRLPQGFKNSPTIFDEALHRDLANFRIQHPQVTLLQYVDDLLLAGATKQDCLEGTKALLLELSDLGYRVSAKKAQICRREVTYLGYSLRDGQRWLTEARKKTVVQIPAPKTAKQMREFLGTAGFCRLWIPGFATLAAPLYPLTKEAGEFSWAPEHQKAFDAIKKALLSAPALALPDVTKPFTLYVDERKGVARGVLTQTLGPWRRPVAYLSKKLDPVASGWPVCLKAIAAVAILVKDADKLTLGQNLTVIAPHALENIVRQPPDRWMTNARMTHYQSLLLTERVTFAPPAALNPATLLPEETDEPVTHDCHELLIEETGVRKDLTDIPLTGEVLTWFTEGSSYVVEGKRMAGAAVVDGTRTIWASSLPEGTSAQKAQLMALTQALRLAEGKSINIYTDSRYAFATAHVHGAIYKQRGLLTSAGREIKNKEEILSLLEALHLPKRLAIIHCPGHQKAKDPISRGNQMADRVAKQAAQGVNLLPMIETPKAP

SEQ ID NO: 415 - DNA, 2061 bp, synthetic construct
  misc_feature 1..2061: note = Engineered reverse transcriptase variants
  source 1..2061: mol_type = other DNA
atgcatcaccatcaccatcatggtggtagcggagtgctgacccttcagctggatgatgaatatcgcttgtacagtccgctggtcaaaccagaccaaaacattcagttctggctcgaacagtttccgcaagcgtgggctgaaactggtggcatgggcctggccaaacaggttcctcctcaggtaatccagttaaaggcatctgccacgccggtgtcagttcgtcagtatccgctgtcgaaagaagcggcagaggggattcgcccacacgtgcagactttgatccagcagggcattctggtaccggttcaaagcccctggaataccccgcttttaccagtccgcaaaccgggtacaaacgattaccgtcctgtgcaagacctgcgcgaagtcaataaacgtccacaggatatccacccaaccgttccgaacccgtataatctgttgtgcgcgttaccgccgcagcgttcctggtacacggtgctggacctgaaggacgcgttcttctgtcttcgcctccatcccaccagccagccactgtttgcctttgaatggcgcgatcctgatacgggccgtactgggcaattaacgtggacccgtttgccgcagggctttaagaacagtcccacgatctttgatgaggctcttcaccgcgacctcgcaaatttccgcatccaacacccacaggtaacgttactccagtatgtcgatgatcttttgttagcgggtgccaccaaacaggactgcttggaaggaacgaaagcacttctcttggaactcagtgatttaggttatcgtgtgtccgccaagaaagctcagatttgtcgccgcgaagtgacatacttaggctattcattgcgtgatggtcaacgttggcttactgaggcgcgcaagcgtaccgtcgttcaaatccccgcccctaagaccgcgaaacagatgcgtgaatttcttggcacggcaggtttctgccgtttgtggattcctggctttgctacgttagcggcacccctctatccactcacgaaagagaaaggagaattctcttgggccccagaacatcagaaagcgtttgacgccatcaagaaagcgttattaagcgctcctgctcttgcattgcccgatgtcaccaaaccattcacgctctacgtggatgaacgcaaaggcgtagcccgcggtgtgttgacacagaccttaggaccttggcgtcgtcccgtggcctacctctcgaagaaacttgacccagttgcaagtggttggcctgtctgcttgaaagctattgccgcagttgcaatcctcgtcaaagatgccgacaaacttactttgggccagaacattactgttattgcaccacacgcccttgaaaacatcgttcgtcagccacctgatcgctggatgaccaatgctcgcatgacgcattatcagagcctcttgcttaccgaacgcgtgacttttgctccacctgcagccttaaaccccgcaacccttttacccgaagaaacagatgagcctgtgacgcatgactgtcatgagctcttgattgaagaaactggcgtacgcaaggacctcaccgatattccattaacaggtgaggtacttacgtggtttaccgaggggtcctcttatgtcgtcgaaggcaaacgtatggctggtgccgccgttgttgatggcacccgtactatctgggcaagcagcttacccgaaggcacgagtgctcagaaagcacaattgatggccttgacccaagccttacgccttgctgaagggaaatcgatcaatatttacaccgattcacgctatgcattcgccacggcacatgtacacggtgccatctacaaacaacgtggtttgttaacttctgctggccgcgagattaagaacaaagaagaaatcctttccttacttgaagccttacacctccccaaacgtctcgctattattcattgtccagggcatcagaaagcaaaagatcctatcagccgtgggaatcaaatggcagatcgtgtcgctaaacaggcagcccaaggcgttaacttgttgcccatgattgagacccctaaagctcca

SEQ ID NO: 416 - protein, 687 aa, synthetic construct
  REGION 1..687: note = Engineered reverse transcriptase variants
MHHHHHHGGSGVLTLQLDDEYRLYSPLVKPDQNIQFWLEQFPQAWAETGGMGLAKQVPPQVIQLKASATPVSVRQYPLSKEAAEGIRPHVQTLIQQGILVPVQSPWNTPLLPVRKPGTNDYRPVQDLREVNKRPQDIHPTVPNPYNLLCALPPQRSWYTVLDLKDAFFCLRLHPTSQPLFAFEWRDPDTGRTGQLTWTRLPQGFKNSPTIFDEALHRDLANFRIQHPQVTLLQYVDDLLLAGATKQDCLEGTKALLLELSDLGYRVSAKKAQICRREVTYLGYSLRDGQRWLTEARKRTVVQIPAPKTAKQMREFLGTAGFCRLWIPGFATLAAPLYPLTKEKGEFSWAPEHQKAFDAIKKALLSAPALALPDVTKPFTLYVDERKGVARGVLTQTLGPWRRPVAYLSKKLDPVASGWPVCLKAIAAVAILVKDADKLTLGQNITVIAPHALENIVRQPPDRWMTNARMTHYQSLLLTERVTFAPPAALNPATLLPEETDEPVTHDCHELLIEETGVRKDLTDIPLTGEVLTWFTEGSSYVVEGKRMAGAAVVDGTRTIWASSLPEGTSAQKAQLMALTQALRLAEGKSINIYTDSRYAFATAHVHGAIYKQRGLLTSAGREIKNKEEILSLLEALHLPKRLAIIHCPGHQKAKDPISRGNQMADRVAKQAAQGVNLLPMIETPKAP

SEQ ID NO: 417 - DNA, 2061 bp, synthetic construct
  misc_feature 1..2061: note = Engineered reverse transcriptase variants
  source 1..2061: mol_type = other DNA
atgcatcaccatcaccatcatggtggtagcggagtgctgacccttcagctggatgatgaatatcgcttgtacagtccgctggtcaaaccagaccaaaacattcagttctggctcgaacagtttccgcaagcgtgggctgaaactggtggcatgggcctggccaaacaggttcctcctcaggtaatccagttaaaggcatctgccacgccggtgagtgttcgtcagtatccgctgtcgaaagaagcggcagaggggattcgcccacacgtgcagcgtttgatccagcagggcattctggtaccggttcaaagcccctggaataccccgcttttaccagtccgcaaaccgggtacaaacgattaccgtcctgtgcaagacctgcgcgaagtcaataaacgtgttcaggatatccacccaaccgttccgaacccgtataatctgttgtgcgcgttaccgccgcagcgttcctggtacacggtgctggacctgaaggacgcgttcttctgtcttcgcctccatcccaccagccagccactgtttgcctttgaatggcgcgatcctgatacgggccgtactgggcaattatgttggacccgtttgccgcagggctttaagaacagtcccacgatctttgatgaggctcttcaccgcgacctcgcaaatttccgcatccaacacccacaggtaacgttactccagtatgtcgatgatcttttgttagcgggtgccaccaaacaggactgcttggaaggaacgaaagcacttctcttggaactcagtgatttaggttatcgtgtgtccgccaagaaagctcagatttgtcgccgcgaagtgacatacttaggctattcattgcgtgatggtcaacgttggcttactgaggcgcgcaagcgtaccgtcgttcaaatccccgcccctaagaccgcgaaacagatgcgtgaatttcttggcacggcaggtttctgccgtttgtggattcctggctcggctacgttagcggcacccctctatccactcacgaaagaggccggagaattctcttgggccccagaacatcagaaagcgtttgacgccatcaagaaagcgttattaagcgctcctgctcttgcattgcccgatgtcaccaaaccattcacgctctacgtggatgaacgcaaaggcgtagcccgcggtgtgttgacacagaccttaggaccttggcgtcgtcccgtggcctacctctcgaagaaacttgacccagttgcaagtggttggcctgtctgcttgaaagctattgccgcagttgcaatcctcgtcaaagatgccgacaaacttactttgggccagaacctgactgttattgcaccacacgcccttgaaaacatcgttcgtcagccacctgatcgctggatgaccaatgctcgcatgacgcattatcagagcctcttgcttaccgaacgcgtgacttttgctccacctgcagccttaaaccccgcaacccttttacccgaagaaacagatgagcctgtgacgcatgactgtcatgagctcttgattgaagaaactggcgtacgcaaggacctcaccgatattccattaacaggtgaggtacttacgtggtttaccgaggggtcctcttatgtcgtcgaaggcaaacgtatggctggtgccgccgttgttgatggcacccgtactatctgggcaagcagcttacccgaaggcacgagtgctcagaaagcagagttgatggccttgacccaagccttacgccttgctgaagggaaatcgatcaatatttacaccgattcacgctatgcattcgccacggcacatgtacacggtgccatctacaaacaacgtggtttgttaacttctgctggccgcgagattaagaacaaagaagaaatcctttccttacttgaagccttacacctccccaaacgtctcgctattattcattgtccagggcatcagaaagcaaaagatcctatcagccgtgggaatcaaatggcagatcgtgtcgctaaacaggcagcccaaggcgttaacttgttgcccatgattgagacccctaaagctcca

SEQ ID NO: 418 - protein, 687 aa, synthetic construct
  REGION 1..687: note = Engineered reverse transcriptase variants
MHHHHHHGGSGVLTLQLDDEYRLYSPLVKPDQNIQFWLEQFPQAWAETGGMGLAKQVPPQVIQLKASATPVSVRQYPLSKEAAEGIRPHVQRLIQQGILVPVQSPWNTPLLPVRKPGTNDYRPVQDLREVNKRVQDIHPTVPNPYNLLCALPPQRSWYTVLDLKDAFFCLRLHPTSQPLFAFEWRDPDTGRTGQLCWTRLPQGFKNSPTIFDEALHRDLANFRIQHPQVTLLQYVDDLLLAGATKQDCLEGTKALLLELSDLGYRVSAKKAQICRREVTYLGYSLRDGQRWLTEARKRTVVQIPAPKTAKQMREFLGTAGFCRLWIPGSATLAAPLYPLTKEAGEFSWAPEHQKAFDAIKKALLSAPALALPDVTKPFTLYVDERKGVARGVLTQTLGPWRRPVAYLSKKLDPVASGWPVCLKAIAAVAILVKDADKLTLGQNLTVIAPHALENIVRQPPDRWMTNARMTHYQSLLLTERVTFAPPAALNPATLLPEETDEPVTHDCHELLIEETGVRKDLTDIPLTGEVLTWFTEGSSYVVEGKRMAGAAVVDGTRTIWASSLPEGTSAQKAELMALTQALRLAEGKSINIYTDSRYAFATAHVHGAIYKQRGLLTSAGREIKNKEEILSLLEALHLPKRLAIIHCPGHQKAKDPISRGNQMADRVAKQAAQGVNLLPMIETPKAP

SEQ ID NO: 419 - DNA, 2061 bp, synthetic construct
  misc_feature 1..2061: note = Engineered reverse transcriptase variants
  source 1..2061: mol_type = other DNA
atgcatcaccatcaccatcatggtggtagcggagtgctgacccttcagctggatgatgaatatcgcttgtacagtccgctggtcaaaccagaccaaaacattcagttctggctcgaacagtttccgcaagcgtgggctgaaactggtggcatgggcctggccaaacaggttcctcctcaggtaatccagttaaaggcatctgccacgccggtgagtgttcgtcagtatccgctgtcgaaagaagcggcagaggggattcgcccacacgtgcagcgtttgatccagcagggcattctggtaccggttcaaagcccctggaataccccgcttttaccagtccgcaaaccgggtacaaacgattaccgtcctgtgcaagacctgcgcgaagtcaataaacgtgttcaggatatccacccaaccgttccgaacccgtataatctgttgtgcgcgttaccgccgcagcgttcctggtacacggtgctggacctgaaggacgcgttcttctgtcttcgcctccatcccaccagccagccactgtttgcctttgaatggcgcgatcctgatacgggccgtactgggcaattatgttggacccgtttgccgcagggctttaagaacagtcccacgatctttgatgaggctcttcaccgcgacctcgcaaatttccgcatccaacacccacaggtaacgttactccagtatgtcgatgatcttttgttagcgggtgccaccaaacaggactgcttggaaggaacgaaagcacttctcttggaactcagtgatttaggttatcgtgtgtccgccaagaaagctcagatttgtcgccgcgaagtgacatacttaggctattcattgcgtgatggtcaacgttggcttactgaggcgcgcaagaagaccgtcgttcaaatccccgcccctaagaccgcgaaacagatgcgtgaatttcttggcacggcaggtttctgccgtttgtggattcctggcttcgctacgttagcggcacccctctatccactcacgaaagagaaaggagaattctcttgggccccagaacatcagaaagcgtttgacgccatcaagaaagcgttattaagcgctcctgctcttgcattgcccgatgtcaccaaaccattcacgctctacgtggatgaacgcaaaggcgtagcccgcggtgtgttgacacagaccttaggaccttggcgtcgtcccgtggcctacctctcgaagaaacttgacccagttgcaagtggttggcctgtctgcttgaaagctattgccgcagttgcaatcctcgtcaaagatgccgacaaacttactttgggccagaacctgactgttattgcaccacacgcccttgaaaacatcgttcgtcagccacctgatcgctggatgaccaatgctcgcatgacgcattatcagagcctcttgcttaccgaacgcgtgacttttgctccacctgcagccttaaaccccgcaacccttttacccgaagaaacagatgagcctgtgacgcatgactgtcatcagctcttgattgaagaaactggcgtacgcaaggacctcaccgatattccattaacaggtgaggtacttacgtggtttaccgaggggtcctcttatgtcgtcgaaggcaaacgtatggctggtgccgccgttgttgatggcacccgtactatctgggcaagcagcttacccgaaggcacgagtgctcagaaagcagaattgatggccttgacccaagccttacgccttgctgaagggaaatcgatcaatatttacaccgattcacgctatgcattcgccacggcacatgtacacggtgccatctacaaacaacgtggtttgttaacttctgctggccgcgagattaagaacaaagaagaaatcctttccttacttgaagccttacacctccccaaacgtctcgctattattcattgtccagggcatcagaaagcaaaagatcctatcagccgtgggaatcaaatggcagatcgtgtcgctaaacaggcagcccaaggcgttaacttgttgcccatgattgagacccctaaagctcca

SEQ ID NO: 420 - protein, 687 aa, synthetic construct
  REGION 1..687: note = Engineered reverse transcriptase variants
MHHHHHHGGSGVLTLQLDDEYRLYSPLVKPDQNIQFWLEQFPQAWAETGGMGLAKQVPPQVIQLKASATPVSVRQYPLSKEAAEGIRPHVQRLIQQGILVPVQSPWNTPLLPVRKPGTNDYRPVQDLREVNKRVQDIHPTVPNPYNLLCALPPQRSWYTVLDLKDAFFCLRLHPTSQPLFAFEWRDPDTGRTGQLCWTRLPQGFKNSPTIFDEALHRDLANFRIQHPQVTLLQYVDDLLLAGATKQDCLEGTKALLLELSDLGYRVSAKKAQICRREVTYLGYSLRDGQRWLTEARKKTVVQIPAPKTAKQMREFLGTAGFCRLWIPGFATLAAPLYPLTKEKGEFSWAPEHQKAFDAIKKALLSAPALALPDVTKPFTLYVDERKGVARGVLTQTLGPWRRPVAYLSKKLDPVASGWPVCLKAIAAVAILVKDADKLTLGQNLTVIAPHALENIVRQPPDRWMTNARMTHYQSLLLTERVTFAPPAALNPATLLPEETDEPVTHDCHQLLIEETGVRKDLTDIPLTGEVLTWFTEGSSYVVEGKRMAGAAVVDGTRTIWASSLPEGTSAQKAELMALTQALRLAEGKSINIYTDSRYAFATAHVHGAIYKQRGLLTSAGREIKNKEEILSLLEALHLPKRLAIIHCPGHQKAKDPISRGNQMADRVAKQAAQGVNLLPMIETPKAP

SEQ ID NO: 421 - DNA, 2061 bp, synthetic construct
  misc_feature 1..2061: note = Engineered reverse transcriptase variants
  source 1..2061: mol_type = other DNA
atgcatcaccatcaccatcatggtggtagcggagtgctgacccttcagctggatgatgaatatcgcttgtacagtccgctggtcaaaccagaccaaaacattcagttctggctcgaacagtttccgcaagcgtgggctgaaactggtggcatgggcctggccaaacaggttcctcctcaggtaatccagttaaaggcatctgccacgccggtgtcagttcgtcagtatccgctgtcgaaagaagcggcagaggggattcgcccacacgtgcagcgtttgatccagcagggcattctggtaccggttcaaagcccctggaataccccgcttttaccagtccgcaaaccgggtacaaacgattaccgtcctgtgcaagacctgcgcgaagtcaataaacgttttcaggatatccacccaaccgttccgaacccgtataatctgttgtgcgcgttaccgccgcagcgttcttggtacacggtgctggacctgaaggacgcgttcttctgtcttcgcctccatcccaccagccagccactgtttgcctttgaatggcgcgatcctgatacgggccgtactgggcaattatgttggacccgtttgccgcagggctttaagaacagtcccacgatctttgatgaggctcttcaccgcgacctcgcaaatttccgcatccaacacccacaggtaacgttactccagtatgtcgatgatcttttgttagcgggtgccaccaaacaggactgcttggaaggaacgaaagcacttctcttggaactcagtgatttaggttatcgtgtgtccgccaagaaagctcagatttgtcgccgcgaagtgacatacttaggctattcattgcgtgatggtcaacgttggcttactcaggcgcgcaagaagaccgtcgttcaaatcccctcccctaagaccgcgaaaccaatgcgtgaatttcttggcacgggtggtttctgccgtttgtggattcctggctcggctacgttagcggcacccctctatccactcacgaaagaggccggagaattctcttgggccccagaacatcagaaagcgtttgacgccatcaagaaagcgttattaagcgctcctgctcttgcattgcccgatgtcaccaaaccattcacgctctacgtggatgaacgcaaaggcgtagcccgcggtgtgttgacacagaccttaggaccttggcgtcgtcccgtggcctacctctcgaagaaacttgacccagttgcaagtggttggcctgtctgcttgaaagctattgccgcagttgcaatcctcgtcaaagatgccgacaaacttactttgggccagaacattactgttattgcaccacacgcccttgaaaacatcgttcgtcagccacctgatcgctggatgaccaatgctcgcatgacgcattatcagagcctcttgcttaccgaacgcgtgacttttgctccacctgcagccttaaaccccgcaacccttttacccgaagaaacagatgagcctgtgacgcatgactgtcatgagctcttgattgaagaaactggcgtacgcaaggacctcaccgatattccattaacaggtgaggtacttacgtggtttaccgaggggtcctcttatgtcgtcgaaggcaaacgtatggctggtgccgccgttgttgatggcacccgtactatctgggcaagcagcttacccgaaggcacgagtgctcagaaagcacaattgatggccttgacccaagccttacgccttgctgaagggaaatcgatcaatatttacaccgattcacgctatgcattcgccacggcacatgtacacggtgccatctacaaacaacgtggtttgttaacttctgctggccgcgagattaagaacaaagaagaaatcctttccttacttgaagccttacacctccccaaacgtctcgctattattcattgtccagggcatcagaaagcaaaagatcctatcagccgtgggaatcaaatggcagatcgtgtcgctaaacaggcagcccaaggcgttaacttgttgcccatgattgagacccctaaagctcca

SEQ ID NO: 422 - protein, 687 aa, synthetic construct
  REGION 1..687: note = Engineered reverse transcriptase variants
MHHHHHHGGSGVLTLQLDDEYRLYSPLVKPDQNIQFWLEQFPQAWAETGGMGLAKQVPPQVIQLKASATPVSVRQYPLSKEAAEGIRPHVQRLIQQGILVPVQSPWNTPLLPVRKPGTNDYRPVQDLREVNKRFQDIHPTVPNPYNLLCALPPQRSWYTVLDLKDAFFCLRLHPTSQPLFAFEWRDPDTGRTGQLCWTRLPQGFKNSPTIFDEALHRDLANFRIQHPQVTLLQYVDDLLLAGATKQDCLEGTKALLLELSDLGYRVSAKKAQICRREVTYLGYSLRDGQRWLTQARKKTVVQIPSPKTAKPMREFLGTGGFCRLWIPGSATLAAPLYPLTKEAGEFSWAPEHQKAFDAIKKALLSAPALALPDVTKPFTLYVDERKGVARGVLTQTLGPWRRPVAYLSKKLDPVASGWPVCLKAIAAVAILVKDADKLTLGQNITVIAPHALENIVRQPPDRWMTNARMTHYQSLLLTERVTFAPPAALNPATLLPEETDEPVTHDCHELLIEETGVRKDLTDIPLTGEVLTWFTEGSSYVVEGKRMAGAAVVDGTRTIWASSLPEGTSAQKAQLMALTQALRLAEGKSINIYTDSRYAFATAHVHGAIYKQRGLLTSAGREIKNKEEILSLLEALHLPKRLAIIHCPGHQKAKDPISRGNQMADRVAKQAAQGVNLLPMIETPKAP

SEQ ID NO: 423 - DNA, 2061 bp, synthetic construct
  misc_feature 1..2061: note = Engineered reverse transcriptase variants
  source 1..2061: mol_type = other DNA
atgcatcaccatcaccatcatggtggtagcggagtgctgacccttcagctggatgatgaatatcgcttgtacagtccgctggtcaaaccagaccaaaacattcagttctggctcgaacagtttccgcaagcgtgggctgaaactggtggcatgggcctggccaaacaggttcctcctcaggtaatccagttaaaggcatctgccacgccggtgtcagttcgtcagtatccgctgtcgaaagaagcgtgtgaggggattcgcccacacgtgcagcgtttgatccagcagggcattctggtaccggttcaaagcccctggaataccccgcttttaccagtccgcaaaccgggtacaaacgattaccgtcctgtgcaagacctgcgcgaagtcaataaacgtgtgcaggatatccacccaaccgttccgaacccgtataatctgttgtgcgcgttaccgccgcagcgttcctggtacacggtgctggacctgaaggacgcgttcttctgtcttcgcctccatcccaccagccagccactgtttgcctttgaatggcgcgatcctgatacgggccgtactgggcaattaacatggacccgtttgccgcagggctttaagaacagtcccacgatctttgatgaggctcttcaccgcgacctcgcaaatttccgcatccaacacccacaggtaacgttactccagtatgtcgatgatcttttgttagcgggtgccaccaaacaggactgcttggaaggaacgaaagcacttctcttggaactcagtgatttaggttatcgtgtgtccgccaagaaagctcagatttgtcgccgcgaagtgacatacttaggctattcattgcgtgatggtcaacgttggcttactgaggcgcgcaagcgtaccgtcgttcaaatccccgcccctaagaccgcgaaacagatgcgtgaatttcttggcacggcaggtttctgccgtttgtggattcctggctttgctacgttagcggcacccctctatccactcacgaaagagaaaggagaattctcttgggccccagaacatcagaaagcgtttgacgccatcaagaaagcgttattaagcgctcctgctcttgcattgcccgatgtcaccaaaccattcacgctctacgtggatgaacgcaaaggcgtagcccgcggtgtgttgacacagaccttaggaccttggcgtcgtcccgtggcctacctctcgaagaaacttgacccagttgcaagtggttggcctgtctgcttgaaagctattgccgcagttgcaatcctcgtcaaagatgccgacaaacttactttgggccagaacctgactgttattgcaccacacgcccttgaaaacatcgttcgtcagccacctgatcgctggatgaccaatgctcgcatgacgcattatcagagcctcttgcttaccgaacgcgtgacttttgctccacctgcagccttaaaccccgcaacccttttacccgaagaaacagatgagcctgtgacgcatgactgtcatgaactcttgattgaagaaactggcgtacgcaaggacctcaccgatattccattaacaggtgaggtacttacgtggtttaccgaggggtcctcttatgtcgtcgaaggcaaacgtatggctggtgccgccgttgttgatggcacccgtactatctgggcaagcagcttacccgaaggcacgagtgctcagaaagcagagttgatggccttgacccaagccttacgccttgctgaagggaaatcgatcaatatttacaccgattcacgctatgcattcgccacggcacatgtacacggtgccatctacaaacaacgtggtttgttaacttctgctggccgcgagattaagaacaaagaagaaatcctttccttacttgaagccttacacctccccaaacgtctcgctattattcattgtccagggcatcagaaagcaaaagatcctatcagccgtgggaatcaaatggcagatcgtgtcgctaaacaggcagcccaaggcgttaacttgttgcccatgattgagacccctaaagctcca

SEQ ID NO: 424 - protein, 687 aa, synthetic construct
  REGION 1..687: note = Engineered reverse transcriptase variants
MHHHHHHGGSGVLTLQLDDEYRLYSPLVKPDQNIQFWLEQFPQAWAETGGMGLAKQVPPQVIQLKASATPVSVRQYPLSKEACEGIRPHVQRLIQQGILVPVQSPWNTPLLPVRKPGTNDYRPVQDLREVNKRVQDIHPTVPNPYNLLCALPPQRSWYTVLDLKDAFFCLRLHPTSQPLFAFEWRDPDTGRTGQLTWTRLPQGFKNSPTIFDEALHRDLANFRIQHPQVTLLQYVDDLLLAGATKQDCLEGTKALLLELSDLGYRVSAKKAQICRREVTYLGYSLRDGQRWLTEARKRTVVQIPAPKTAKQMREFLGTAGFCRLWIPGFATLAAPLYPLTKEKGEFSWAPEHQKAFDAIKKALLSAPALALPDVTKPFTLYVDERKGVARGVLTQTLGPWRRPVAYLSKKLDPVASGWPVCLKAIAAVAILVKDADKLTLGQNLTVIAPHALENIVRQPPDRWMTNARMTHYQSLLLTERVTFAPPAALNPATLLPEETDEPVTHDCHELLIEETGVRKDLTDIPLTGEVLTWFTEGSSYVVEGKRMAGAAVVDGTRTIWASSLPEGTSAQKAELMALTQALRLAEGKSINIYTDSRYAFATAHVHGAIYKQRGLLTSAGREIKNKEEILSLLEALHLPKRLAIIHCPGHQKAKDPISRGNQMADRVAKQAAQGVNLLPMIETPKAP

SEQ ID NO: 425 - DNA, 2061 bp, synthetic construct
  misc_feature 1..2061: note = Engineered reverse transcriptase variants
  source 1..2061: mol_type = other DNA
atgcatcaccatcaccatcatggtggtagcggagtgctgacccttcagctggatgatgaatatcgcttgtacagtccgctggtcaaaccagaccaaaacattcagttctggctcgaacagtttccgcaagcgtgggctgaaactggtggcatgggcctggccaaacaggttcctcctcaggtaatccagttaaaggcatctgccacgccggtgtcagttcgtcagtatccgctgtcgaaagaagcgtgtgaggggattcgcccacacgtgcagcgtttgatccagcagggcattctggtaccggttcaaagcccctggaataccccgcttttaccagtccgcaaaccgggtacaaacgattaccgtcctgtgcaagacctgcgcgaagtcaataaacgtgtgcaggatatccacccaaccgttccgaacccgtataatctgttgtgcgcgttaccgccgcagcgttcctggtacacggtgctggacctgaaggacgcgttcttctgtcttcgcctccatcccaccagccagccactgtttgcctttgaatggcgcgatcctgatacgggccgtactgggcaattaacatggacccgtttgccgcagggctttaagaacagtcccacgatctttgatgaggctcttcaccgcgacctcgcaaatttccgcatccaacacccacaggtaacgttactccagtatgtcgatgatcttttgttagcgggtgccaccaaacaggactgcttggaaggaacgaaagcacttctcttggaactcagtgatttaggttatcgtgtgtccgccaagaaagctcagatttgtcgccgcgaagtgacatacttaggctattcattgcgtgatggtcaacgttggcttactgaggcgcgcaagcgtaccgtcgttcaaatccccgcccctaagactaccaaacagatgcgtgaatttcttggcacggcaggtttctgccgtttgtggattcctggctttgctacgttagcggcacccctctatccactcacgaaagagaaaggagaattctcttgggccccagaacatcagaaagcgtttgacgccatcaagaaagcgttattaagcgctcctgctcttgcattgcccgatgtcaccaaaccattcacgctctacgtggatgaacgcaaaggcgtagcccgcggtgtgttgacacagaccttaggaccttggcgtcgtcccgtggcctacctctcgaagaaacttgacccagttgcaagtggttggcctgtctgcttgaaagctattgccgcagttgcaatcctcgtcaaagatgccgacaaacttactttgggccagaacctgactgttattgcaccacacgcccttgaaaacatcgttcgtcagccacctgatcgctggatgaccaatgctcgcatgacgcattatcagagcctcttgcttaccgaacgcgtgacttttgctccacctgcagccttaaaccccgcaacccttttacccgaagaaacagatgagcctgtgacgcatgactgtcatgaactcttgattgaagaaactggcgtacgcaaggacctcaccgatattccattaacaggtgaggtacttacgtggtttaccgaggggtcctcttatgtcgtcgaaggcaaacgtatggctggtgccgccgttgttgatggcacccgtactatctgggcaagcagcttacccgaaggcacgagtgctcagaaagcagagttgatggccttgacccaagccttacgccttgctgaagggaaatcgatcaatatttacaccgattcacgctatgcattcgccacggcacatgtacacggtgccatctacaaacaacgtggtttgttaacttctgctggccgcgagattaagaacaaagaagaaatcctttccttacttgaagccttacacctccccaaacgtctcgctattattcattgtccagggcatcagaaagcaaaagatcctatcagccgtgggaatcaaatggcagatcgtgtcgctaaacaggcagcccaaggcgttaacttgttgcccatgattgagacccctaaagctcca

SEQ ID NO: 426 - protein, 687 aa, synthetic construct
  REGION 1..687: note = Engineered reverse transcriptase variants
MHHHHHHGGSGVLTLQLDDEYRLYSPLVKPDQNIQFWLEQFPQAWAETGGMGLAKQVPPQVIQLKASATPVSVRQYPLSKEACEGIRPHVQRLIQQGILVPVQSPWNTPLLPVRKPGTNDYRPVQDLREVNKRVQDIHPTVPNPYNLLCALPPQRSWYTVLDLKDAFFCLRLHPTSQPLFAFEWRDPDTGRTGQLTWTRLPQGFKNSPTIFDEALHRDLANFRIQHPQVTLLQYVDDLLLAGATKQDCLEGTKALLLELSDLGYRVSAKKAQICRREVTYLGYSLRDGQRWLTEARKRTVVQIPAPKTTKQMREFLGTAGFCRLWIPGFATLAAPLYPLTKEKGEFSWAPEHQKAFDAIKKALLSAPALALPDVTKPFTLYVDERKGVARGVLTQTLGPWRRPVAYLSKKLDPVASGWPVCLKAIAAVAILVKDADKLTLGQNLTVIAPHALENIVRQPPDRWMTNARMTHYQSLLLTERVTFAPPAALNPATLLPEETDEPVTHDCHELLIEETGVRKDLTDIPLTGEVLTWFTEGSSYVVEGKRMAGAAVVDGTRTIWASSLPEGTSAQKAELMALTQALRLAEGKSINIYTDSRYAFATAHVHGAIYKQRGLLTSAGREIKNKEEILSLLEALHLPKRLAIIHCPGHQKAKDPISRGNQMADRVAKQAAQGVNLLPMIETPKAP

SEQ ID NO: 427 - DNA, 2061 bp, synthetic construct
  misc_feature 1..2061: note = Engineered reverse transcriptase variants
  source 1..2061: mol_type = other DNA
atgcatcaccatcaccatcatggtggtagcggagtgctgacccttcagctggatgatgaatatcgcttgtacagtccgctggtcaaaccagaccaaaacattcagttctggctcgaacagtttccgcaagcgtgggctgaaactggtggcatgggcctggccaaacaggttcctcctcaggtaatccagttaaaggcatctgccacgccggtgtcagttcgtcagtatccgctgtcgaaagaagcgtgtgaggggattcgcccacacgtgcagcgtttgatccagcagggcattctggtaccggttcaaagcccctggaataccccgcttttaccagtccgtaaaccgggtacaaacgattaccgtcctgtgcaagacctgcgcgaagtcaataaacgtgtgcaggatatccacccaaccgttccgaacccgtataatctgttgtgcgcgttaccgccgcagcgttcctggtacacggtgctggacctgaaggacgcgttcttctgtcttcgcctccatcccaccagccagccactgtttgcctttgaatggcgcgatcctgatacgggccgtactgggcaattaacatggacccgtttgccgcagggctttaagaacagtcccacgatctttgacgaggctcttcaccgcgacctcgcaaatttccgcatccaacacccacaggtaacgttactccagtatgtcgatgatcttttgttagcgggtgccaccaaacaggactgcttggaaggaacgaaagcacttctcttggaactcagtgatttaggttatcgtgtgtccgccaagaaagctcagatttgtcgccgcgaagtgacatacttaggctattcattgcgtgatggtcaacgttggcttactgaggcgcgcaagcgtaccgtcgttcaaatccccgcccctaagaccgcgaaacagatgcgtgaatttcttggcacgtcgggtttctgccgtttgtggattcctggctttgctacgttagcggcacccctctatccactcacgaaatggaaaggagaattctcttgggccccagaacatcagaaagcgtttgacgccatcaagaaagcgttattaagcgctcctgctcttgcattgcccgatgtcaccaaaccattcacgctctacgtggatgaacgcaaaggcgtagcccgcggtgtgttgacacagaccttaggaccttggcgtcgtcccgtggcctacctctcgaagaaacttgacccagttgcaagtggttggcctgtctgcttgaaagctattgccgcagttgcaatcctcgtcaaagatgccgacaaacttactttgggccagaacctgactgttattgcaccacacgcccttgaaaacatcgttcgtcagccacctgatcgctggatgaccaatgctcgcatgacgcattatcagagcctcttgcttaccgaacgcgtgacttttgctccacctgcagccttaaaccccgcaacccttttacccgaagaaacagatgagcctgtgacgcatgactgtcatcaactcttgattgaagaaactggcgtacgcaaggacctcaccgatattccattaacaggtgaggtacttacgtggtttaccgaggggtcctcttatgtcgtcgaaggcaaacgtatggctggtgccgccgttgttgatggcacccgtactatctgggcaagcagcttacccgaaggcacgagtgctcagaaagcagaattgatggccttgacccaagccttacgccttgctgaagggaaatcgatcaatatttacaccgattcacgctatgcattcgccacggcacatgtacacggtgccatctacaaacaacgtggtttgttaacttctgctggccgcgagattaagaacaaagaagaaatcctttccttacttgaagccttacacctccccaaacgtctcgctattattcattgtccagggcatcagaaagcaaaagatcctatcagccgtgggaatcaaatggcagatcgtgtcgctaaacaggcagcccaaggcgttaacttgttgcccatgattgagacccctaaagctcca

SEQ ID NO: 428 - protein, 687 aa, synthetic construct
  REGION 1..687: note = Engineered reverse transcriptase variants
MHHHHHHGGSGVLTLQLDDEYRLYSPLVKPDQNIQFWLEQFPQAWAETGGMGLAKQVPPQVIQLKASATPVSVRQYPLSKEACEGIRPHVQRLIQQGILVPVQSPWNTPLLPVRKPGTNDYRPVQDLREVNKRVQDIHPTVPNPYNLLCALPPQRSWYTVLDLKDAFFCLRLHPTSQPLFAFEWRDPDTGRTGQLTWTRLPQGFKNSPTIFDEALHRDLANFRIQHPQVTLLQYVDDLLLAGATKQDCLEGTKALLLELSDLGYRVSAKKAQICRREVTYLGYSLRDGQRWLTEARKRTVVQIPAPKTAKQMREFLGTSGFCRLWIPGFATLAAPLYPLTKWKGEFSWAPEHQKAFDAIKKALLSAPALALPDVTKPFTLYVDERKGVARGVLTQTLGPWRRPVAYLSKKLDPVASGWPVCLKAIAAVAILVKDADKLTLGQNLTVIAPHALENIVRQPPDRWMTNARMTHYQSLLLTERVTFAPPAALNPATLLPEETDEPVTHDCHQLLIEETGVRKDLTDIPLTGEVLTWFTEGSSYVVEGKRMAGAAVVDGTRTIWASSLPEGTSAQKAELMALTQALRLAEGKSINIYTDSRYAFATAHVHGAIYKQRGLLTSAGREIKNKEEILSLLEALHLPKRLAIIHCPGHQKAKDPISRGNQMADRVAKQAAQGVNLLPMIETPKAP

SEQ ID NO: 429 - DNA, 2061 bp, synthetic construct
  misc_feature 1..2061: note = Engineered reverse transcriptase variants
  source 1..2061: mol_type = other DNA
atgcatcaccatcaccatcatggtggtagcggagtgctgacccttcagctggatgatgaatatcgcttgtacagtccgctggtcaaaccagaccaaaacattcagttctggctcgaacagtttccgcaagcgtgggctgaaactggtggcatgggcctggccaaacaggttcctcctcaggtaatccagttaaaggcatctgccacgccggtgtcagttcgtcagtatccgctgtcgaaagaagcgtgtgaggggattcgcccacacgtgcagcgtttgatccagcagggcattctggtaccggttcaaagcccctggaataccccgcttttaccagtccgcaaaccgggtacaaacgattaccgtcctgtgcaagacctgcgcgaagtcaataaacgtgtgcaggatatccacccaaccgttccgaacccgtataatctgttgtgcgcgttaccgccgcagcgttcctggtacacggtgctggacctgaaggacgcgttcttctgtcttcgcctccatcccaccagccagccactgtttgcctttgaatggcgcgatcctgatacgggccgtactgggcaattaacatggacccgtttgccgcagggctttatgaacagtcccacgatctttgatgaggctcttcaccgcgacctcgcaaatttccgcatccaacacccacaggtaacgttactccagtatgtcgatgatcttttgttagcgggtgccaccaaacaggactgcttggaaggaacgaaagcacttctcttggaactcagtgatttaggttatcgtgtgtccgccaagaaagctcagatttgtcgccgcgaagtgacatacttaggctattcattgcgtgatggtcaacgttggcttactgaggcgcgcaagcgtaccgtcgttcaaatccccgcccctaagactgcaaaacagatgcgtgaatttcttggcacggcaggtttctgccgtttgtggattcctggctttgctacgttagcggcacccctctatccactcacgaaagagaaaggagaattctcttgggccccagaacatcagaaagcgtttgacgccatcaagaaagcgttattaagcgctcctgctcttgcattgcccgatgtcaccaaaccattcacgctctacgtggatgaacgcaaaggcgtagcccgcggtgtgttgacacagaccttaggaccttggcgtcgtcccgtggcctacctctcgaagaaacttgacccagttgcaagtggttggcctgtctgcttgaaagctattgccgcagttgcaatcctcgtcaaagatgccgacaaacttactttgggccagaacattactgttattgcaccacacgcccttgaaaacatcgttcgtcagccacctgatcgctggatgaccaatgctcgcatgacgcattatcagagcctcttgcttaccgaacgcgtgacttttgctccacctgcagccttaaaccccgcaacccttttacccgaagaaacagatgagcctgtgacgcatgactgtcatgaactcttgattgaagaaactggcgtacgcaaggacctcaccgatattccattaacaggtgaggtacttacgtggtttaccgaggggtcctcttatgtcgtcgaaggcaaacgtatggctggtgccgccgttgttgatggcacccgtactatctgggcaagcagcttacccgaaggcacgagtgctcagaaagcagaattgatggccttgacccaagccttacgccttgctgaagggaaatcgatcaatatttacaccgattcacgctatgcattcgccacggcacatgtacacggtgccatctacaaacaacgtggtttgttaacttctgctggccgcgagattaagaacaaagaagaaatcctttccttacttgaagccttacacctccccaaacgtctcgctattattcattgtccagggcatcagaaagcaaaagatcctatcagccgtgggaatcaaatggcagatcgtgtcgctaaacaggcagcccaaggcgttaacttgttgcccatgattgagacccctaaagctcca

SEQ ID NO: 430 - protein, 687 aa, synthetic construct
  REGION 1..687: note = Engineered reverse transcriptase variants
MHHHHHHGGSGVLTLQLDDEYRLYSPLVKPDQNIQFWLEQFPQAWAETGGMGLAKQVPPQVIQLKASATPVSVRQYPLSKEACEGIRPHVQRLIQQGILVPVQSPWNTPLLPVRKPGTNDYRPVQDLREVNKRVQDIHPTVPNPYNLLCALPPQRSWYTVLDLKDAFFCLRLHPTSQPLFAFEWRDPDTGRTGQLTWTRLPQGFMNSPTIFDEALHRDLANFRIQHPQVTLLQYVDDLLLAGATKQDCLEGTKALLLELSDLGYRVSAKKAQICRREVTYLGYSLRDGQRWLTEARKRTVVQIPAPKTAKQMREFLGTAGFCRLWIPGFATLAAPLYPLTKEKGEFSWAPEHQKAFDAIKKALLSAPALALPDVTKPFTLYVDERKGVARGVLTQTLGPWRRPVAYLSKKLDPVASGWPVCLKAIAAVAILVKDADKLTLGQNITVIAPHALENIVRQPPDRWMTNARMTHYQSLLLTERVTFAPPAALNPATLLPEETDEPVTHDCHELLIEETGVRKDLTDIPLTGEVLTWFTEGSSYVVEGKRMAGAAVVDGTRTIWASSLPEGTSAQKAELMALTQALRLAEGKSINIYTDSRYAFATAHVHGAIYKQRGLLTSAGREIKNKEEILSLLEALHLPKRLAIIHCPGHQKAKDPISRGNQMADRVAKQAAQGVNLLPMIETPKAP

SEQ ID NO: 431 - DNA, 2061 bp, synthetic construct
  misc_feature 1..2061: note = Engineered reverse transcriptase variants
  source 1..2061: mol_type = other DNA
atgcatcaccatcaccatcatggtggtagcggagtgctgacccttcagctggatgatgaatatcgcttgtacagtccgctggtcaaaccagaccaaaacattcagttctggctcgaacagtttccgcaagcgtgggctgaaactggtggcatgggcctggccaaacaggttcctcctcaggtaatccagttaaaggcatctgccacgccggtgtcagttcgtcagtatccgctgtcgaaagaagcgtgtgaggggattcgcccacacgtgcagcgtttgatccagcagggcattctggtaccggttcaaagcccctggaataccccgcttttaccagtccgcaaaccgggtacaaacgattaccgtcctgtgcaagacctgcgcgaagtcaataaacgtgtgcaggatatccacccaaccgttccgaacccgtataatctgttgtgcgcgttaccgccgcagcgttcctggtacacggtgctggacctgaaggacgcgttcttctgtcttcgcctccatcccaccagccagccactgtttgcctttgaatggcgcgatcctgatacgggccgtactgggcaattaacatggacccgtttgccgcagggctttaagaacagtcccacgatctttgatgaggctcttcaccgcgacctcgcaaatttccgcatccaacacccacaggtaacgttactccagtatgtcgatgatcttttgttagcgggtgccaccaaacaggactgcttggaaggaacgaaagcacttctcttggaactcagtgatttaggttatcgtgtgtccgccaagaaagctcagatttgtcgccgcgaagtgacatacttaggctattcattgcgtgatggtcaacgttggcttactgaggcgcgcaagcgtaccgtcgttcaaatccccgcccctaagactgcaaaacagatgcgtgaatttcttggcacggcaggtttctgccgtttgtggattcctggctttgctacgttagcggcacccctctatccactcacgaaagagaaaggagaattctcttgggccccagaacatcagaaagcgtttgacgccatcaagaaagcgttattaagcgctcctgctcttgcattgcccgatgtcaccaaaccattcacgctctacgtggatgaacgcaaaggcgtagcccgcggtgtgttgacacagaccttaggaccttggcgtcgtcccgtggcctacctctcgaagaaacttgacccagttgcaagtggttggcctgtctgcttgaaagctattgccgcagttgcaatcctcgtcaaagatgccgacaaacttactttgggccagaacattactgttattgcaccacacgcccttgaaaacatcgttcgtcagccacctgatcgctggatgaccaatgctcgcatgacgcattatcagagcctcttgcttaccgaacgcgtgacttttgctccacctgcagccttaaaccccgcaacccttttacccgaagaaacagatgagcctgtgacgcatgactgtcatgaactcttgattgaagaaactggcgtacgcaaggacctcaccgatattccattaacaggtgaggtacttacgtggtttaccgaggggtcctcttatgtcgtcgaaggcaaacgtatggctggtgccgccgttgttgatggcacccgtactatctgggcaagcagcttacccgaaggcacgagtgctcagaaagcagagttgatggccttgacccaagccttacgccttgctgaagggaaatcgatcaatatttacaccgattcacgctatgcattcgccacggcacatgtacacggtgccatctacaaacaacgtggtttgttaacttctgctggccgcgagattaagaacaaagaagaaatcctttccttacttgaagccttacacctccccaaacgtctcgctattattcattgtccagggcatcagaaagcaaaagatcctatcagccgtgggaatcaaatggcagatcgtgtcgctaaacaggcagcccaaggcgttaacttgttgcccatgattgagacccctaaagctcca

SEQ ID NO: 432 - protein, 687 aa, synthetic construct
  REGION 1..687: note = Engineered reverse transcriptase variants
MHHHHHHGGSGVLTLQLDDEYRLYSPLVKPDQNIQFWLEQFPQAWAETGGMGLAKQVPPQVIQLKASATPVSVRQYPLSKEACEGIRPHVQRLIQQGILVPVQSPWNTPLLPVRKPGTNDYRPVQDLREVNKRVQDIHPTVPNPYNLLCALPPQRSWYTVLDLKDAFFCLRLHPTSQPLFAFEWRDPDTGRTGQLTWTRLPQGFKNSPTIFDEALHRDLANFRIQHPQVTLLQYVDDLLLAGATKQDCLEGTKALLLELSDLGYRVSAKKAQICRREVTYLGYSLRDGQRWLTEARKRTVVQIPAPKTAKQMREFLGTAGFCRLWIPGFATLAAPLYPLTKEKGEFSWAPEHQKAFDAIKKALLSAPALALPDVTKPFTLYVDERKGVARGVLTQTLGPWRRPVAYLSKKLDPVASGWPVCLKAIAAVAILVKDADKLTLGQNITVIAPHALENIVRQPPDRWMTNARMTHYQSLLLTERVTFAPPAALNPATLLPEETDEPVTHDCHELLIEETGVRKDLTDIPLTGEVLTWFTEGSSYVVEGKRMAGAAVVDGTRTIWASSLPEGTSAQKAELMALTQALRLAEGKSINIYTDSRYAFATAHVHGAIYKQRGLLTSAGREIKNKEEILSLLEALHLPKRLAIIHCPGHQKAKDPISRGNQMADRVAKQAAQGVNLLPMIETPKAP

SEQ ID NO: 433 - DNA, 2061 bp, synthetic construct
  misc_feature 1..2061: note = Engineered reverse transcriptase variants
  source 1..2061: mol_type = other DNA
atgcatcaccatcaccatcatggtggtagcggagtgctgacccttcagctggatgatgaatatcgcttgtacagtccgctggtcaaaccagaccaaaacattcagttctggctcgaacagtttccgcaagcgtgggctgaaactggtggcatgggcctggccaaacaggttcctcctcaggtaatccagttaaaggcatctgccacgccggtgtcagttcgtcagtatccgctgtcgaaagaagcgtgtgaggggattcgcccacacgtgcagcgtttgatccagcagggcattctggtaccggttcaaagcccctggaataccccgcttttaccagtcggtaaaccgggtacaaacgattaccgtcctgtgcaagacctgcgcgaagtcaataaacgtgtgcaggatatccacccaaccgttccgaacccgtataatctgttgtgcgcgttaccgccgcagcgttcctggtacacggtgctggacctgaaggacgcgttcttctgtcttcgcctccatcccaccagccagccactgtttgcctttgaatggcgcgatcctgatacgggccgtactgggcaattaacatggacccgtttgccgcagggctttaagaacagtcccacgatctttgacgaggctcttcaccgcgacctcgcaaatttccgcatccaacacccacaggtaacgttactccagtatgtcgatgatcttttgttagcgggtgccaccaaacaggactgcttggaaggaacgaaagcacttctcttggaactcagtgatttaggttatcgtgtgtccgccaagaaagctcagatttgtcgccgcgaagtgacatacttaggctattcattgcgtgatggtcaacgttggcttactgaggcgcgcaagcgcaccgtcgttcaaatccccgcccctaagaccgcgaaacagatgcgtgaatttcttggcacggcaggtttctgccgtttgtggattcctggctttgctacgttagcggcacccctctatccactcacgaaagagaaaggagaattctcttgggccccagaacatcagaaagcgtttgacgccatcaagaaagcgttattaagcgctcctgctcttgcattgcccgatgtcaccaaaccattcacgctctacgtggatgaacgcaaaggcgtagcccgcggtgtgttgacacagaccttaggaccttggcgtcgtcccgtggcctacctctcgaagaaacttgacccagttgcaagtggttggcctgtctgcttgaaagctattgccgcagttgcaatcctcgtcaaagatgccgacaaacttactttgggccagaacctgactgttattgcaccacacgcccttgaaaacatcgttcgtcagccacctgatcgctggatgaccaatgctcgcatgacgcattatcagagcctcttgcttaccgaacgcgtgacttttgctccacctgcagccttaaaccccgcaacccttttacccgaagaaacagatgagcctgtgacgcatgactgtcatgaactcttgattgaagaaactggcgtacgcaaggacctcaccgatattccattaacaggtgaggtacttacgtggtttaccgaggggtcctcttatgtcgtcgaaggcaaacgtatggctggtgccgccgttgttgatggcacccgtactatctgggcaagcagcttacccgaaggcacgagtgctcagaaagcagagttgatggccttgacccaagccttacgccttgctgaagggaaatcgatcaatatttacaccgattcacgctatgcattcgccacggcacatgtacacggtgccatctacaaacaacgtggtttgttaacttctgctggccgcgagattaagaacaaagaagaaatcctttccttacttgaagccttacacctccccaaacgtctcgctattattcattgtccagggcatcagaaagcaaaagatcctatcagccgtgggaatcaaatggcagatcgtgtcgctaaacaggcagcccaaggcgttaacttgttgcccatgattgagacccctaaagctcca

SEQ ID NO: 434 - protein, 687 aa, synthetic construct
  REGION 1..687: note = Engineered reverse transcriptase variants
MHHHHHHGGSGVLTLQLDDEYRLYSPLVKPDQNIQFWLEQFPQAWAETGGMGLAKQVPPQVIQLKASATPVSVRQYPLSKEACEGIRPHVQRLIQQGILVPVQSPWNTPLLPVGKPGTNDYRPVQDLREVNKRVQDIHPTVPNPYNLLCALPPQRSWYTVLDLKDAFFCLRLHPTSQPLFAFEWRDPDTGRTGQLTWTRLPQGFKNSPTIFDEALHRDLANFRIQHPQVTLLQYVDDLLLAGATKQDCLEGTKALLLELSDLGYRVSAKKAQICRREVTYLGYSLRDGQRWLTEARKRTVVQIPAPKTAKQMREFLGTAGFCRLWIPGFATLAAPLYPLTKEKGEFSWAPEHQKAFDAIKKALLSAPALALPDVTKPFTLYVDERKGVARGVLTQTLGPWRRPVAYLSKKLDPVASGWPVCLKAIAAVAILVKDADKLTLGQNLTVIAPHALENIVRQPPDRWMTNARMTHYQSLLLTERVTFAPPAALNPATLLPEETDEPVTHDCHELLIEETGVRKDLTDIPLTGEVLTWFTEGSSYVVEGKRMAGAAVVDGTRTIWASSLPEGTSAQKAELMALTQALRLAEGKSINIYTDSRYAFATAHVHGAIYKQRGLLTSAGREIKNKEEILSLLEALHLPKRLAIIHCPGHQKAKDPISRGNQMADRVAKQAAQGVNLLPMIETPKAP

SEQ ID NO: 435 - DNA, 2061 bp, synthetic construct
  misc_feature 1..2061: note = Engineered reverse transcriptase variants
  source 1..2061: mol_type = other DNA
atgcatcaccatcaccatcatggtggtagcggagtgctgacccttcagctggatgatgaatatcgcttgtacagtccgctggtcaaaccagaccaaaacattcagttctggctcgaacagtttccgcaagcgtgggctgaaactggtggcatgggcctggccaaacaggttcctcctcaggtaatccagttaaaggcatctgccacgccggtgtcagttcgtcagtatccgctgtcgaaagaagcgtgtgaggggattcgcccacacgtgcagcgtttgatccagcagggcattctggtaccggttcaaagcccctggaataccccgcttttaccagtcggtaaaccgggtacaaacgattaccgtcctgtgcaagacctgcgcgaagtcaataaacgtgtgcaggatatccacccaaccgttccgaacccgtataatctgttgtgcgcgttaccgccgcagcgttcctggtacacggtgctggacctgaaggacgcgttcttctgtcttcgcctccatcccaccagccagccactgtttgcctttgaatggcgcgatcctgatacgggccgtactgggcaattaacatggacccgtttgccgcagggctttaagaacagtcccacgatctttgatgaggctcttcaccgcgacctcgcaaatttccgcatccaacacccacaggtaacgttactccagtatgtcgatgatcttttgttagcgggtgccaccaaacaggactgcttggaaggaacgaaagcacttctcttggaactcagtgatttaggttatcgtgtgtccgccaagaaagctcagatttgtcgccgcgaagtgacatacttaggctattcattgcgtgatggtcaacgttggcttactgaggcgcgcaagcgcaccgtcgttcaaatccccgcccctaagactaccaaacagatgcgtgaatttcttggcacggcaggtttctgccgtttgtggattcctggctttgctacgttagcggcacccctctatccactcacgaaagagaaaggagaattctcttgggccccagaacatcagaaagcgtttgacgccatcaagaaagcgttattaagcgctcctgctcttgcattgcccgatgtcaccaaaccattcacgctctacgtggatgaacgcaaaggcgtagcccgcggtgtgttgacacagaccttaggaccttggcgtcgtcccgtggcctacctctcgaagaaacttgacccagttgcaagtggttggcctgtctgcttgaaagctattgccgcagttgcaatcctcgtcaaagatgccgacaaacttactttgggccagaacctgactgttattgcaccacacgcccttgaaaacatcgttcgtcagccacctgatcgctggatgaccaatgctcgcatgacgcattatcagagcctcttgcttaccgaacgcgtgacttttgctccacctgcagccttaaaccccgcaacccttttacccgaagaaacagatgagcctgtgacgcatgactgtcatcaactcttgattgaagaaactggcgtacgcaaggacctcaccgatattccattaacaggtgaggtacttacgtggtttaccgaggggtcctcttatgtcgtcgaaggcaaacgtatggctggtgccgccgttgttgatggcacccgtactatctgggcaagcagcttacccgaaggcacgagtgctcagaaagcagagttgatggccttgacccaagccttacgccttgctgaagggaaatcgatcaatatttacaccgattcacgctatgcattcgccacggcacatgtacacggtgccatctacaaacaacgtggtttgttaacttctgctggccgcgagattaagaacaaagaagaaatcctttccttacttgaagccttacacctccccaaacgtctcgctattattcattgtccagggcatcagaaagcaaaagatcctatcagccgtgggaatcaaatggcagatcgtgtcgctaaacaggcagcccaaggcgttaacttgttgcccatgattgagacccctaaagctcca

SEQ ID NO: 436 - protein, 687 aa, synthetic construct
  REGION 1..687: note = Engineered reverse transcriptase variants
MHHHHHHGGSGVLTLQLDDEYRLYSPLVKPDQNIQFWLEQFPQAWAETGGMGLAKQVPPQVIQLKASATPVSVRQYPLSKEACEGIRPHVQRLIQQGILVPVQSPWNTPLLPVGKPGTNDYRPVQDLREVNKRVQDIHPTVPNPYNLLCALPPQRSWYTVLDLKDAFFCLRLHPTSQPLFAFEWRDPDTGRTGQLTWTRLPQGFKNSPTIFDEALHRDLANFRIQHPQVTLLQYVDDLLLAGATKQDCLEGTKALLLELSDLGYRVSAKKAQICRREVTYLGYSLRDGQRWLTEARKRTVVQIPAPKTTKQMREFLGTAGFCRLWIPGFATLAAPLYPLTKEKGEFSWAPEHQKAFDAIKKALLSAPALALPDVTKPFTLYVDERKGVARGVLTQTLGPWRRPVAYLSKKLDPVASGWPVCLKAIAAVAILVKDADKLTLGQNLTVIAPHALENIVRQPPDRWMTNARMTHYQSLLLTERVTFAPPAALNPATLLPEETDEPVTHDCHQLLIEETGVRKDLTDIPLTGEVLTWFTEGSSYVVEGKRMAGAAVVDGTRTIWASSLPEGTSAQKAELMALTQALRLAEGKSINIYTDSRYAFATAHVHGAIYKQRGLLTSAGREIKNKEEILSLLEALHLPKRLAIIHCPGHQKAKDPISRGNQMADRVAKQAAQGVNLLPMIETPKAP

SEQ ID NO: 437 - DNA, 2061 bp, synthetic construct
  misc_feature 1..2061: note = Engineered reverse transcriptase variants
  source 1..2061: mol_type = other DNA
atgcatcaccatcaccatcatggtggtagcggagtgctgacccttcagctggatgatgaatatcgcttgtacagtccgctggtcaaaccagaccaaaacattcagttctggctcgaacagtttccgcaagcgtgggctgaaactggtggcatgggcctggccaaacaggttcctcctcaggtaatccagttaaaggcatctgccacgccggtgtcagttcgtcagtatccgctgtcgaaagaagcgtgtgaggggattcgcccacacgtgcagcgtttgatccagcagggcattctggtaccggttcaaagcccctggaataccccgcttttaccagtcggtaaaccgggtacaaacgattaccgtcctgtgcaagacctgcgcgaagtcaataaacgtgtgcaggatatccacccaaccgttccgaacccgtataatctgttgtgcgcgttaccgccgcagcgttcctggtacacggtgctggacctgaaggacgcgttcttctgtcttcgcctccatcccaccagccagccactgtttgcctttgaatggcgcgatcctgatacgggccgtactgggcaattaacatggacccgtttgccgcagggctttaagaacagtcccacgatctttgacgaggctcttcaccgcgacctcgcaaatttccgcatccaacacccacaggtaacgttactccagtatgtcgatgatcttttgttagcgggtgccaccaaacaggactgcttggaaggaacgaaagcacttctcttggaactcagtgatttaggttatcgtgtgtccgccaagaaagctcagatttgtcgccgcgaagtgacatacttaggctattcattgcgtgatggtcaacgttggcttactgaggcgcgcaagaagaccgtcgttcaaatccccgcccctaagaccgcgaaacagatgcgtgaatttcttggcacgtgtggtttctgccgtttgtggattcctggctttgctacgttagcggcacccctctatccactcacgaaagagaaaggagaattctcttgggccccagaacatcagaaagcgtttgacgccatcaagaaagcgttattaagcgctcctgctcttgcattgcccgatgtcaccaaaccattcacgctctacgtggatgaacgcaaaggcgtagcccgcggtgtgttgacacagaccttaggaccttggcgtcgtcccgtggcctacctctcgaagaaacttgacccagttgcaagtggttggcctgtctgcttgaaagctattgccgcagttgcaatcctcgtcaaagatgccgacaaacttactttgggccagaacctgactgttattgcaccacacgcccttgaaaacatcgttcgtcagccacctgatcgctggatgaccaatgctcgcatgacgcattatcagagcctcttgcttaccgaacgcgtgacttttgctccacctgcagccttaaaccccgcaacccttttacccgaagaaacagatgagcctgtgacgcatgactgtcatgaactcttgattgaagaaactggcgtacgcaaggacctcaccgatattccattaacaggtgaggtacttacgtggtttaccgaggggtcctcttatgtcgtcgaaggcaaacgtatggctggtgccgccgttgttgatggcacccgtactatctgggcaagcagcttacccgaaggcacgagtgctcagaaagcagagttgatggccttgacccaagccttacgccttgctgaagggaaatcgatcaatatttacaccgattcacgctatgcattcgccacggcacatgtacacggtgccatctacaaacaacgtggtttgttaacttctgctggccgcgagattaagaacaaagaagaaatcctttccttacttgaagccttacacctccccaaacgtctcgctattattcattgtccagggcatcagaaagcaaaagatcctatcagccgtgggaatcaaatggcagatcgtgtcgctaaacaggcagcccaaggcgttaacttgttgcccatgattgagacccctaaagctcca

SEQ ID NO: 438 - protein, 687 aa, synthetic construct
  REGION 1..687: note = Engineered reverse transcriptase variants
MHHHHHHGGSGVLTLQLDDEYRLYSPLVKPDQNIQFWLEQFPQAWAETGGMGLAKQVPPQVIQLKASATPVSVRQYPLSKEACEGIRPHVQRLIQQGILVPVQSPWNTPLLPVGKPGTNDYRPVQDLREVNKRVQDIHPTVPNPYNLLCALPPQRSWYTVLDLKDAFFCLRLHPTSQPLFAFEWRDPDTGRTGQLTWTRLPQGFKNSPTIFDEALHRDLANFRIQHPQVTLLQYVDDLLLAGATKQDCLEGTKALLLELSDLGYRVSAKKAQICRREVTYLGYSLRDGQRWLTEARKKTVVQIPAPKTAKQMREFLGTCGFCRLWIPGFATLAAPLYPLTKEKGEFSWAPEHQKAFDAIKKALLSAPALALPDVTKPFTLYVDERKGVARGVLTQTLGPWRRPVAYLSKKLDPVASGWPVCLKAIAAVAILVKDADKLTLGQNLTVIAPHALENIVRQPPDRWMTNARMTHYQSLLLTERVTFAPPAALNPATLLPEETDEPVTHDCHELLIEETGVRKDLTDIPLTGEVLTWFTEGSSYVVEGKRMAGAAVVDGTRTIWASSLPEGTSAQKAELMALTQALRLAEGKSINIYTDSRYAFATAHVHGAIYKQRGLLTSAGREIKNKEEILSLLEALHLPKRLAIIHCPGHQKAKDPISRGNQMADRVAKQAAQGVNLLPMIETPKAP

SEQ ID NO: 439 - DNA, 2061 bp, synthetic construct
  misc_feature 1..2061: note = Engineered reverse transcriptase variants
  source 1..2061: mol_type = other DNA
atgcatcaccatcaccatcatggtggtagcggagtgctgacccttcagctggatgatgaatatcgcttgtacagtccgctggtcaaaccagaccaaaacattcagttctggctcgaacagtttccgcaagcgtgggctgaaactggtggcatgggcctggccaaacaggttcctcctcaggtaatccagttaaaggcatctgccacgccggtgtcagttcgtcagtatccgctgtcgaaagaagcgtgtgaggggattcgcccacacgtgcagcgtttgatccagcagggcattctggtaccggttcaaagcccctggaataccccgcttttaccagtccgcaaaccgggtacaaacgattaccgtcctgtgcaagacctgcgcgaagtcaataaacgtgtgcaggatatccacccaaccgttccgaacccgtataatctgttgtgcgcgttaccgccgcagcgttcctggtacacggtgctggacctgaaggacgcgttcttctgtcttcgcctccatcccaccagccagccactgtttgcctttgaatggcgcgatcctgatacgggccgtactgggcaattaacatggaccctgttgccgcagggctttaagaacagtcccacgatctttaaggaggctcttcaccgcgacctcgcaaatttccgcatccaacacccacaggtaacgttactccagtatgtcgatgatcttttgttagcgggtgccaccaaacaggactgcttggaaggaacgaaagcacttctcttggaactcagtgatttaggttatcgtgtgtccgccaagaaagctcagatttgtcgccgcgaagtgacatacttaggctattcattgcgtgatggtcaacgttggcttactgaggcgcgcaagaagaccgtcgttcaaatccccgcccctaagactgaaaaacagatgcgtgaatttcttggcacgtgtggtttctgccgtttgtggattcctggctttgctacgttagcggcacccctctatccactcacgaaagagaaaggagaattctcttgggccccagaacatcagaaagcgtttgacgccatcaagaaagcgttattaagcgctcctgctcttgcattgcccgatgtcaccaaaccattcacgctctacgtggatgaacgcaaaggcgtagcccgcggtgtgttgacacagaccttaggaccttggcgtcgtcccgtggcctacctctcgaagaaacttgacccagttgcaagtggttggcctgtctgcttgaaagctattgccgcagttgcaatcctcgtcaaagatgccgacaaacttactttgggccagaacattactgttattgcaccacacgcccttgaaaacatcgttcgtcagccacctgatcgctggatgaccaatgctcgcatgacgcattatcagagcctcttgcttaccgaacgcgtgacttttgctccacctgcagccttaaaccccgcaacccttttacccgaagaaacagatgagcctgtgacgcatgactgtcatgaactcttgattgaagaaactggcgtacgcaaggacctcaccgatattccattaacaggtgaggtacttacgtggtttaccgaggggtcctcttatgtcgtcgaaggcaaacgtatggctggtgccgccgttgttgatggcacccgtactatctgggcaagcagcttacccgaaggcacgagtgctcagaaagcagagttgatggccttgacccaagccttacgccttgctgaagggaaatcgatcaatatttacaccgattcacgctatgcattcgccacggcacatgtacacggtgccatctacaaacaacgtggtttgttaacttctgctggccgcgagattaagaacaaagaagaaatcctttccttacttgaagccttacacctccacaaacgtctcgctattattcattgtccagggcatcagaaagcaaaagatcctatcagccgtgggaatcaaatggcagatcgtgtcgctaaacaggcagcccaaggcgttaacttgttgcccatgattgagacccctaaagctcca

SEQ ID NO: 440 - protein, 687 aa, synthetic construct
  REGION 1..687: note = Engineered reverse transcriptase variants
MHHHHHHGGSGVLTLQLDDEYRLYSPLVKPDQNIQFWLEQFPQAWAETGGMGLAKQVPPQVIQLKASATPVSVRQYPLSKEACEGIRPHVQRLIQQGILVPVQSPWNTPLLPVRKPGTNDYRPVQDLREVNKRVQDIHPTVPNPYNLLCALPPQRSWYTVLDLKDAFFCLRLHPTSQPLFAFEWRDPDTGRTGQLTWTLLPQGFKNSPTIFKEALHRDLANFRIQHPQVTLLQYVDDLLLAGATKQDCLEGTKALLLELSDLGYRVSAKKAQICRREVTYLGYSLRDGQRWLTEARKKTVVQIPAPKTEKQMREFLGTCGFCRLWIPGFATLAAPLYPLTKEKGEFSWAPEHQKAFDAIKKALLSAPALALPDVTKPFTLYVDERKGVARGVLTQTLGPWRRPVAYLSKKLDPVASGWPVCLKAIAAVAILVKDADKLTLGQNITVIAPHALENIVRQPPDRWMTNARMTHYQSLLLTERVTFAPPAALNPATLLPEETDEPVTHDCHELLIEETGVRKDLTDIPLTGEVLTWFTEGSSYVVEGKRMAGAAVVDGTRTIWASSLPEGTSAQKAELMALTQALRLAEGKSINIYTDSRYAFATAHVHGAIYKQRGLLTSAGREIKNKEEILSLLEALHLHKRLAIIHCPGHQKAKDPISRGNQMADRVAKQAAQGVNLLPMIETPKAP

SEQ ID NO: 441 - DNA, 2061 bp, synthetic construct
  misc_feature 1..2061: note = Engineered reverse transcriptase variants
  source 1..2061: mol_type = other DNA
atgcatcaccatcaccatcatggtggtagcggagtgctgacccttcagctggatgatgaatatcgcttgtacagtccgctggtcaaaccagaccaaaacattcagttctggctcgaacagtttccgcaagcgtgggctgaaactggtggcatgggcctggccaaacaggttcctcctcaggtaatccagttaaaggcatctgccacgccggtgtcagttcgtcagtatccgctgtcgaaagaagcgtgtgaggggattcgcccacacgtgcagcgtttgatccagcagggcattctggtaccggttcaaagcccctggaataccccgcttttaccagtccgtaaaccgggtacaaacgattaccgtcctgtgcaagacctgcgcgaagtcaataaacgtgtgcaggatatccacccaaccgttccgaacccgtataatctgttgtgcgcgttaccgccgcagcgttcctggtacacggtgctggacctgaaggacgcgttcttctgtcttcgcctccatcccaccagccagccactgtttgcctttgaatggcgcgatcctgatacgggccgtactgggcaattaacatggaccctgttgccgcagggctttaagaacagtcccacgatctttgacgaggctcttcaccgcgacctcgcaaatttccgcatccaacacccacaggtaacgttactccagtatgtcgatgatcttttgttagcgggtgccaccaaacaggactgcttggaaggaacgaaagcacttctcttggaactcagtgatttaggttatcgtgtgtccgccaagaaagctcagatttgtcgccgcgaagtgacatacttaggctattcattgcgtgatggtcaacgttggcttactgaggcgcgcaagcgtaccgtcgttcaaatccccgcccctaagaccgcgaaacagatgcgtgaatttcttggcacggcaggtttctgccgtttgtggattcctggctttgctacgttagcggcacccctctatccactcacgaaagagaaaggagaattctcttgggccccagaacatcagaaagcgtttgacgccatcaagaaagcgttattaagcgctcctgctcttgcattgcccgatgtcaccaaaccattcacgctctacgtggatgaacgcaaaggcgtagcccgcggtgtgttgacacagaccttaggaccttggcgtcgtcccgtggcctacctctcgaagaaacttgacccagttgcaagtggttggcctgtctgcttgaaagctattgccgcagttgcaatcctcgtcaaagatgccgacaaacttactttgggccagaacctgactgttattgcaccacacgcccttgaaaacatcgttcgtcagccacctgatcgctggatgaccaatgctcgcatgacgcattatcagagcctcttgcttaccgaacgcgtgacttttgctccacctgcagccttaaaccccgcaacccttttacccgaagaaacagatgagcctgtgacgcatgactgtcatcaactcttgattgaagaaactggcgtacgcaaggacctcaccgatattccattaacaggtgaggtacttacgtggtttaccgaggggtcctcttatgtcgtcgaaggcaaacgtatggctggtgccgccgttgttgatggcacccgtactatctgggcaagcagcttacccgaaggcacgagtgctcagaaagcagagttgatggccttgacccaagccttacgccttgctgaagggaaatcgatcaatatttacaccgattcacgctatgcattcgccacggcacatgtacacggtgccatctacaaacaacgtggtttgttaacttctgctggccgcgagattaagaacaaagaagaaatcctttccttacttgaagccttacacctccccaaacgtctcgctattattcattgtccagggcatcagaaagcaaaagatcctatcagccgtgggaatcaaatggcagatcgtgtcgctaaacaggcagcccaaggcgttaacttgttgcccatgattgagacccctaaagctcca

SEQ ID NO: 442 - protein, 687 aa, synthetic construct
  REGION 1..687: note = Engineered reverse transcriptase variants
MHHHHHHGGSGVLTLQLDDEYRLYSPLVKPDQNIQFWLEQFPQAWAETGGMGLAKQVPPQVIQLKASATPVSVRQYPLSKEACEGIRPHVQRLIQQGILVPVQSPWNTPLLPVRKPGTNDYRPVQDLREVNKRVQDIHPTVPNPYNLLCALPPQRSWYTVLDLKDAFFCLRLHPTSQPLFAFEWRDPDTGRTGQLTWTLLPQGFKNSPTIFDEALHRDLANFRIQHPQVTLLQYVDDLLLAGATKQDCLEGTKALLLELSDLGYRVSAKKAQICRREVTYLGYSLRDGQRWLTEARKRTVVQIPAPKTAKQMREFLGTAGFCRLWIPGFATLAAPLYPLTKEKGEFSWAPEHQKAFDAIKKALLSAPALALPDVTKPFTLYVDERKGVARGVLTQTLGPWRRPVAYLSKKLDPVASGWPVCLKAIAAVAILVKDADKLTLGQNLTVIAPHALENIVRQPPDRWMTNARMTHYQSLLLTERVTFAPPAALNPATLLPEETDEPVTHDCHQLLIEETGVRKDLTDIPLTGEVLTWFTEGSSYVVEGKRMAGAAVVDGTRTIWASSLPEGTSAQKAELMALTQALRLAEGKSINIYTDSRYAFATAHVHGAIYKQRGLLTSAGREIKNKEEILSLLEALHLPKRLAIIHCPGHQKAKDPISRGNQMADRVAKQAAQGVNLLPMIETPKAP

SEQ ID NO: 443 - DNA, 2061 bp, synthetic construct
  misc_feature 1..2061: note = Engineered reverse transcriptase variants
  source 1..2061: mol_type = other DNA
atgcatcaccatcaccatcatggtggtagcggagtgctgacccttcagctggatgatgaatatcgcttgtacagtccgctggtcaaaccagaccaaaacattcagttctggctcgaacagtttccgcaagcgtgggctgaaactggtggcatgggcctggccaaacaggttcctcctcaggtaatccagttaaaggcatctgccacgccggtgtcagttcgtcagtatccgctgtcgaaagaagcgtgtgaggggattcgcccacacgtgcagcgtttgatccagcagggcattctggtaccggttcaaagcccctggaataccccgcttttaccagtccgcaaaccgggtacaaacgattaccgtcctgtgcaagacctgcgcgaagtcaataaacgtgtgcaggatatccacccaaccgttccgaacccgtataatctgttgtgcgcgttaccgccgcagcgttcctggtacacggtgctggacctgaaggacgcgttcttctgtcttcgcctccatcccaccagccagccactgtttgcctttgaatggcgcgatcctgatacgggccgtactgggcaattaacatggacccgtttgccgcagggctttaagaacagtcccacgatctttgatgaggctcttcaccgcgacctcgcaaatttccgcatccaacacccacaggtaacgttactccagtatgtcgatgatcttttgttagcgggtgccaccaaacaggactgcttggaaggaacgaaagcacttctcttggaactcagtgatttaggttatcgtgtgtccgccaagaaagctcagatttgtcgccgcgaagtgacatacttaggctattcattgcgtgatggtcaacgttggcttactgaggcgcgcaagaagaccgtcgttcaaatccccgcccctaagaccgcgaaacagatgcgtgaatttcttggcacggcaggtttctgccgtttgtggattcctggctttgctacgttagcggcacccctctatccactcacgaaagagaaaggagaattctcttgggccccagaacatcagaaagcgtttgacgccatcaagaaagcgttattaagcgctcctgctcttgcattgcccgatgtcaccaaaccattcacgctctacgtggatgaacgcaaaggcgtagcccgcggtgtgttgacacagaccttaggaccttggcgtcgtcccgtggcctacctctcgaagaaacttgacccagttgcaagtggttggcctgtctgcttgaaagctattgccgcagttgcaatcctcgtcaaagatgccgacaaacttactttgggccagaacctgactgttattgcaccacacgcccttgaaaacatcgttcgtcagccacctgatcgctggatgaccaatgctcgcatgacgcattatcagagcctcttgcttaccgaacgcgtgacttttgctccacctgcagccttaaaccccgcaacccttttacccgaagaaacagatgagcctgtgacgcatgactgtcatgaactcttgattgaagaaactggcgtacgcaaggacctcaccgatattccattaacaggtgaggtacttacgtggtttaccgaggggtcctcttatgtcgtcgaaggcaaacgtatggctggtgccgccgttgttgatggcacccgtactatctgggcaagcagcttacccgaaggcacgagtgctcagaaagcagagttgatggccttgacccaagccttacgccttgctgaagggaaatcgatcaatatttacaccgattcacgctatgcattcgccacggcacatgtacacggtgccatctacaaacaacgtggtttgttaacttctgctggccgcgagattaagaacaaagaagaaatcctttccttacttgaagccttacacctccccaaacgtctcgctattattcattgtccagggcatcagaaagcaaaagatcctatcagccgtgggaatcaaatggcagatcgtgtcgctaaacaggcagcccaaggcgttaacttgttgcccatgattgagacccctaaagctcca

SEQ ID NO: 444 - protein, 687 aa, synthetic construct
  REGION 1..687: note = Engineered reverse transcriptase variants
MHHHHHHGGSGVLTLQLDDEYRLYSPLVKPDQNIQFWLEQFPQAWAETGGMGLAKQVPPQVIQLKASATPVSVRQYPLSKEACEGIRPHVQRLIQQGILVPVQSPWNTPLLPVRKPGTNDYRPVQDLREVNKRVQDIHPTVPNPYNLLCALPPQRSWYTVLDLKDAFFCLRLHPTSQPLFAFEWRDPDTGRTGQLTWTRLPQGFKNSPTIFDEALHRDLANFRIQHPQVTLLQYVDDLLLAGATKQDCLEGTKALLLELSDLGYRVSAKKAQICRREVTYLGYSLRDGQRWLTEARKKTVVQIPAPKTAKQMREFLGTAGFCRLWIPGFATLAAPLYPLTKEKGEFSWAPEHQKAFDAIKKALLSAPALALPDVTKPFTLYVDERKGVARGVLTQTLGPWRRPVAYLSKKLDPVASGWPVCLKAIAAVAILVKDADKLTLGQNLTVIAPHALENIVRQPPDRWMTNARMTHYQSLLLTERVTFAPPAALNPATLLPEETDEPVTHDCHELLIEETGVRKDLTDIPLTGEVLTWFTEGSSYVVEGKRMAGAAVVDGTRTIWASSLPEGTSAQKAELMALTQALRLAEGKSINIYTDSRYAFATAHVHGAIYKQRGLLTSAGREIKNKEEILSLLEALHLPKRLAIIHCPGHQKAKDPISRGNQMADRVAKQAAQGVNLLPMIETPKAP

SEQ ID NO: 445 - DNA, 2061 bp, synthetic construct
  misc_feature 1..2061: note = Engineered reverse transcriptase variants
  source 1..2061: mol_type = other DNA
atgcatcaccatcaccatcatggtggtagcggagtgctgacccttcagctggatgatgaatatcgcttgtacagtccgctggtcaaaccagaccaaaacattcagttctggctcgaacagtttccgcaagcgtgggctgaaactggtggcatgggcctggccaaacaggttcctcctcaggtaatccagttaaaggcatctgccacgccggtgtcagttcgtcagtatccgctgtcgaaagaagcgtgtgaggggattcgcccacacgtgcagcgtttgatccagcagggcattctggtaccggttcaaagcccctggaataccccgcttttaccagtccgtaaaccgggtacaaacgattaccgtcctgtgcaagacctgcgcgaagtcaataaacgtgtgcaggatatccacccaaccgttccgaacccgtataatctgttgtgcgcgttaccgccgcagcgttcctggtacacggtgctggacctgaaggacgcgttcttctgtcttcgcctccatcccaccagccagccactgtttgcctttgaatggcgcgatcctgatacgggccgtactgggcaattaacatggacccgtttgccgcagggctttaagaacagtcccacgatctttgatgaggctcttcaccgcgacctcgcaaatttccgcatccaacacccacaggtaacgttactccagtatgtcgatgatcttttgttagcgggtgccaccaaacaggactgcttggaaggaacgaaagcacttctcttggaactcagtgatttaggttatcgtgtgtccgccaagaaagctcagatttgtcgccgcgaagtgacatacttaggctattcattgcgtgatggtcaacgttggcttactgaggcgcgcaagaagaccgtcgttcaaatccccgcccctaagactgcaaaacagatgcgtgaatttcttggcacggcaggtttctgccgtttgtggattcctggctttgctacgttagcggcacccctctatccactcacgaaatggaaaggagaattctcttgggccccagaacatcagaaagcgtttgacgccatcaagaaagcgttattaagcgctcctgctcttgcattgcccgatgtcaccaaaccattcacgctctacgtggatgaacgcaaaggcgtagcccgcggtgtgttgacacagaccttaggaccttggcgtcgtcccgtggcctacctctcgaagaaacttgacccagttgcaagtggttggcctgtctgcttgaaagctattgccgcagttgcaatcctcgtcaaagatgccgacaaacttactttgggccagaacctgactgttattgcaccacacgcccttgaaaacatcgttcgtcagccacctgatcgctggatgaccaatgctcgcatgacgcattatcagagcctcttgcttaccgaacgcgtgacttttgctccacctgcagccttaaaccccgcaacccttttacccgaagaaacagatgagcctgtgacgcatgactgtcatgaactcttgattgaagaaactggcgtacgcaaggacctcaccgatattccattaacaggtgaggtacttacgtggtttaccgaggggtcctcttatgtcgtcgaaggcaaacgtatggctggtgccgccgttgttgatggcacccgtactatctgggcaagcagcttacccgaaggcacgagtgctcagaaagcagagttgatggccttgacccaagccttacgccttgctgaagggaaatcgatcaatatttacaccgattcacgctatgcattcgccacggcacatgtacacggtgccatctacaaacaacgtggtttgttaacttctgctggccgcgagattaagaacaaagaagaaatcctttccttacttgaagccttacacctccccaaacgtctcgctattattcattgtccagggcatcagaaagcaaaagatcctatcagccgtgggaatcaaatggcagatcgtgtcgctaaacaggcagcccaaggcgttaacttgttgcccatgattgagacccctaaagctcca

SEQ ID NO: 446 - protein, 687 aa, synthetic construct
  REGION 1..687: note = Engineered reverse transcriptase variants
MHHHHHHGGSGVLTLQLDDEYRLYSPLVKPDQNIQFWLEQFPQAWAETGGMGLAKQVPPQVIQLKASATPVSVRQYPLSKEACEGIRPHVQRLIQQGILVPVQSPWNTPLLPVRKPGTNDYRPVQDLREVNKRVQDIHPTVPNPYNLLCALPPQRSWYTVLDLKDAFFCLRLHPTSQPLFAFEWRDPDTGRTGQLTWTRLPQGFKNSPTIFDEALHRDLANFRIQHPQVTLLQYVDDLLLAGATKQDCLEGTKALLLELSDLGYRVSAKKAQICRREVTYLGYSLRDGQRWLTEARKKTVVQIPAPKTAKQMREFLGTAGFCRLWIPGFATLAAPLYPLTKWKGEFSWAPEHQKAFDAIKKALLSAPALALPDVTKPFTLYVDERKGVARGVLTQTLGPWRRPVAYLSKKLDPVASGWPVCLKAIAAVAILVKDADKLTLGQNLTVIAPHALENIVRQPPDRWMTNARMTHYQSLLLTERVTFAPPAALNPATLLPEETDEPVTHDCHELLIEETGVRKDLTDIPLTGEVLTWFTEGSSYVVEGKRMAGAAVVDGTRTIWASSLPEGTSAQKAELMALTQALRLAEGKSINIYTDSRYAFATAHVHGAIYKQRGLLTSAGREIKNKEEILSLLEALHLPKRLAIIHCPGHQKAKDPISRGNQMADRVAKQAAQGVNLLPMIETPKAP

SEQ ID NO: 447 - DNA, 2061 bp, synthetic construct
  misc_feature 1..2061: note = Engineered reverse transcriptase variants
  source 1..2061: mol_type = other DNA
atgcatcaccatcaccatcatggtggtagcggagtgctgacccttcagctggatgatgaatatcgcttgtacagtccgctggtcaaaccagaccaaaacattcagttctggctcgaacagtttccgcaagcgtgggctgaaactggtggcatgggcctggccaaacaggttcctcctcaggtaatccagttaaaggcatctgccacgccggtgtcagttcgtcagtatccgctgtcgaaagaagcgtgtgaggggattcgcccacacgtgcagcgtttgatccagcagggcattctggtaccggttcaaagcccctggaataccccgcttttaccagtccgcaaaccgggtacaaacgattaccgtcctgtgcaagacctgcgcgaagtcaataaacgtgtgcaggatatccacccaaccgttccgaacccgtataatctgttgtgcgcgttaccgccgcagcgttcctggtacacggtgctggacctgaaggacgcgttcttctgtcttcgcctccatcccaccagccagccactgtttgcctttgaatggcgcgatcctgatacgggccgtactgggcaattaacatggacccgtttgccgcagggctttaagaacagtcccacgatctttgacgaggctcttcaccgcgacctcgcaaatttccgcatccaacacccacaggtaacgttactccagtatgtcgatgatcttttgttagcgggtgccaccaaacaggactgcttggaaggaacgaaagcacttctcttggaactcagtgatttaggttatcgtgtgtccgccaagaaagctcagatttgtcgccgcgaagtgacatacttaggctattcattgcgtgatggtcaacgttggcttactgaggcgcgcaagcgtaccgtcgttcaaatccccgcccctaagggggaaaaacagatgcgtgaatttcttggcacggcaggtttctgccgtttgtggattcctggctttgctacgttagcggcacccctctatccactcacgaaagagaaaggagaattctcttgggccccagaacatcagaaagcgtttgacgccatcaagaaagcgttattaagcgctcctgctcttgcattgcccgatgtcaccaaaccattcacgctctacgtggatgaacgcaaaggcgtagcccgcggtgtgttgacacagaccttaggaccttggcgtcgtcccgtggcctacctctcgaagaaacttgacccagttgcaagtggttggcctgtctgcttgaaagctattgccgcagttgcaatcctcgtcaaagatgccgacaaacttactttgggccagaacctgactgttattgcaccacacgcccttgaaaacatcgttcgtcagccacctgatcgctggatgaccaatgctcgcatgacgcattatcagagcctcttgcttaccgaacgcgtgacttttgctccacctgcagccttaaaccccgcaacccttttacccgaagaaacagatgagcctgtgacgcatgactgtcatgaactcttgattgaagaaactggcgtacgcaaggacctcaccgatattccattaacaggtgaggtacttacgtggtttaccgaggggtcctcttatgtcgtcgaaggcaaacgtatggctggtgccgccgttgttgatggcacccgtactatctgggcaagcagcttacccgaaggcacgagtgctcagaaagcagaattgatggccttgacccaagccttacgccttgctgaagggaaatcgatcaatatttacaccaattcacgctatgcattcgccacggcacatgtacacggtgccatctacaaacaacgtggtttgttaacttctgctggccgcgagattaagaacaaagaagaaatcctttccttacttgaagccttacaccaccccaaacgtctcgctattattcattgtccagggcatcagaaagcaaaagatcctatcagccgtgggaatcaaatggcagatcgtgtcgctaaacaggcagcccaaggcgttaacttgttgcccatgattgagacccctaaagctcca

SEQ ID NO: 448 - protein, 687 aa, synthetic construct
  REGION 1..687: note = Engineered reverse transcriptase variants
MHHHHHHGGSGVLTLQLDDEYRLYSPLVKPDQNIQFWLEQFPQAWAETGGMGLAKQVPPQVIQLKASATPVSVRQYPLSKEACEGIRPHVQRLIQQGILVPVQSPWNTPLLPVRKPGTNDYRPVQDLREVNKRVQDIHPTVPNPYNLLCALPPQRSWYTVLDLKDAFFCLRLHPTSQPLFAFEWRDPDTGRTGQLTWTRLPQGFKNSPTIFDEALHRDLANFRIQHPQVTLLQYVDDLLLAGATKQDCLEGTKALLLELSDLGYRVSAKKAQICRREVTYLGYSLRDGQRWLTEARKRTVVQIPAPKGEKQMREFLGTAGFCRLWIPGFATLAAPLYPLTKEKGEFSWAPEHQKAFDAIKKALLSAPALALPDVTKPFTLYVDERKGVARGVLTQTLGPWRRPVAYLSKKLDPVASGWPVCLKAIAAVAILVKDADKLTLGQNLTVIAPHALENIVRQPPDRWMTNARMTHYQSLLLTERVTFAPPAALNPATLLPEETDEPVTHDCHELLIEETGVRKDLTDIPLTGEVLTWFTEGSSYVVEGKRMAGAAVVDGTRTIWASSLPEGTSAQKAELMALTQALRLAEGKSINIYTNSRYAFATAHVHGAIYKQRGLLTSAGREIKNKEEILSLLEALHHPKRLAIIHCPGHQKAKDPISRGNQMADRVAKQAAQGVNLLPMIETPKAP

SEQ ID NO: 449 - DNA, 2061 bp, synthetic construct
  misc_feature 1..2061: note = Engineered reverse transcriptase variants
  source 1..2061: mol_type = other DNA
atgcatcaccatcaccatcatggtggtagcggagtgctgacccttcagctggatgatgaatatcgcttgtacagtccgctggtcaaaccagaccaaaacattcagttctggctcgaacagtttccgcaagcgtgggctgaaactggtggcatgggcctggccaaacaggttcctcctcaggtaatccagttaaaggcatctgccacgccggtgtcagttcgtcagtatccgctgtcgaaagaagcgtgtgaggggattcgcccacacgtgcagcgtttgatccagcagggcattctggtaccggttcaaagcccctggaataccccgcttttaccaactggtaaaccgggtacaaacgattaccgtcctgtgcaagacctgcgcgaagtcaataaacgtgtgcaggatatccacccaaccgttccgaacccgtataatctgttgtgcgcgttaccgccgcagcgttcctggtacacggtgctggacctgaaggacgcgttcttctgtcttcgcctccatcccaccagccagccactgtttgcctttgaatggcgcgatcctgatacgggccgtactgggcaattaacatggacccgtttgccgcagggctttatgaacagtcccacgatctttaaggaggctcttcaccgcgacctcgcaaatttccgcatccaacacccacaggtaacgttactccagtatgtcgatgatcttttgttagcgggtgccaccaaacaggactgcttggaaggaacgaaagcacttctcttggaactcagtgatttaggttatcgtgtgtccgccaagaaagctcagatttgtcgccgcgaagtgacatacttaggctattcattgcgtgatggtcaacgttggcttactgaggcgcgcaagcgcaccgtcgttcaaatccccgcccctaagaccgcgaaacagatgcgtgaatttcttggcacggcaggtttctgccgtttgtggattcctggctttgctacgttagcggcacccctctatccactcacgaaagagaaaggagaattctcttgggccccagaacatcagaaagcgtttgacgccatcaagaaagcgttattaagcgctcctgctcttgcattgcccgatgtcaccaaaccattcacgctctacgtggatgaacgcaaaggcgtagcccgcggtgtgttgacacagaccttaggaccttggcgtcgtcccgtggcctacctctcgaagaaacttgacccagttgcaagtggttggcctgtctgcttgaaagctattgccgcagttgcaatcctcgtcaaagatgccgacaaacttactttgggccagaacctgactgttattgcaccacacgcccttgaaaacatcgttcgtcagccacctgatcgctggatgaccaatgctcgcatgacgcattatcagagcctcttgcttaccgaacgcgtgacttttgctccacctgcagccttaaaccccgcaacccttttacccgaagaaacagatgagcctgtgacgcatgactgtcatgaactcttgattgaagaaactggcgtacgcaaggacctcaccgatattccattaacaggtgaggtacttacgtggtttaccgaggggtcctcttatgtcgtcgaaggcaaacgtatggctggtgccgccgttgttgatggcacccgtactatctgggcaagcagcttacccgaaggcacgagtgctcagaaagcagaattgatggccttgacccaagccttacgccttgctgaagggaaatcgatcaatatttacaccgattcacgctatgcattcgccacggcacatgtacacggtgccatctacaaacaacgtggtttgttaacttctgctggccgcgagattaagaacaaagaagaaatcctttccttacttgaagccttacacctccccaaacgtctcgctattattcattgtccagggcatcagaaagcaaaagatcctatcagccgtgggaatcaaatggcagatcgtgtcgctaaacaggcagcccaaggcgttaacttgttgcccatgattgagacccctaaagctcca

SEQ ID NO: 450 - protein, 687 aa, synthetic construct
  REGION 1..687: note = Engineered reverse transcriptase variants
MHHHHHHGGSGVLTLQLDDEYRLYSPLVKPDQNIQFWLEQFPQAWAETGGMGLAKQVPPQVIQLKASATPVSVRQYPLSKEACEGIRPHVQRLIQQGILVPVQSPWNTPLLPTGKPGTNDYRPVQDLREVNKRVQDIHPTVPNPYNLLCALPPQRSWYTVLDLKDAFFCLRLHPTSQPLFAFEWRDPDTGRTGQLTWTRLPQGFMNSPTIFKEALHRDLANFRIQHPQVTLLQYVDDLLLAGATKQDCLEGTKALLLELSDLGYRVSAKKAQICRREVTYLGYSLRDGQRWLTEARKRTVVQIPAPKTAKQMREFLGTAGFCRLWIPGFATLAAPLYPLTKEKGEFSWAPEHQKAFDAIKKALLSAPALALPDVTKPFTLYVDERKGVARGVLTQTLGPWRRPVAYLSKKLDPVASGWPVCLKAIAAVAILVKDADKLTLGQNLTVIAPHALENIVRQPPDRWMTNARMTHYQSLLLTERVTFAPPAALNPATLLPEETDEPVTHDCHELLIEETGVRKDLTDIPLTGEVLTWFTEGSSYVVEGKRMAGAAVVDGTRTIWASSLPEGTSAQKAELMALTQALRLAEGKSINIYTDSRYAFATAHVHGAIYKQRGLLTSAGREIKNKEEILSLLEALHLPKRLAIIHCPGHQKAKDPISRGNQMADRVAKQAAQGVNLLPMIETPKAP

SEQ ID NO: 451 - DNA, 2061 bp, synthetic construct
  misc_feature 1..2061: note = Engineered reverse transcriptase variants
  source 1..2061: mol_type = other DNA
atgcatcaccatcaccatcatggtggtagcggagtgctgacccttcagctggatgatgaatatcgcttgtacagtccgctggtcaaaccagaccaaaacattcagttctggctcgaacagtttccgcaagcgtgggctgaaactggtggcatgggcctggccaaacaggttcctcctcaggtaatccagttaaaggcatctgccacgccggtgtcagttcgtcagtatccgctgtcgaaagaagcgtgtgaggggattcgcccacacgtgcagcgtttgatccagcagggcattctggtaccggttcaaagcccctggaataccccgcttttaccagtccgtaaaccgggtacaaacgattaccgtcctgtgcaagacctgcgcgaaagcaataaacgtgtgcaggatatccacccaaccgttccgaacccgtataatctgttgtgcgcgttaccgccgcagcgttcctggtacacggtgctggacctgaaggacgcgttcttctgtcttcgcctccatcccaccagccagccactgtttgcctttgaatggcgcgatcctgatacgggccgtactgggcaattaacatggacccgtttgccgcagggctttaagaacagtcccacgatctttgatgaggctcttcaccgcgacctcgcaaatttccgcatccaacacccacaggtaacgttactccagtatgtcgatgatcttttgttagcgggtgccaccaaacaggactgcttggaaggaacgaaagcacttctcttggaactcagtgatttaggttatcgtgtgtccgccaagaaagctcagatttgtcgccgcgaagtgacatacttaggctattcattgcgtgatggtcaacgttggcttactgaggcgcgcaagaagaccgtcgttcaaatccccgcccctaagaccgcgaaacagatgcgtgaatttcttggcacggcaggtttctgccgtttgtggattcctggctttgctacgttagcggcacccctctatccactcacgaaagagaaaggagaattctcttgggccccagaacatcagaaagcgtttgacgccatcaagaaagcgttattaagcgctcctgctcttgcattgcccgatgtcaccaaaccattcacgctctacgtggatgaacgcaaaggcgtagcccgcggtgtgttgacacagaccttaggaccttggcgtcgtcccgtggcctacctctcgaagaaacttgacccagttgcaagtggttggcctgtctgcttgaaagctattgccgcagttgcaatcctcgtcaaagatgccgacaaacttactttgggccagaacattactgttattgcaccacacgcccttgaaaacatcgttcgtcagccacctgatcgctggatgaccaatgctcgcatgacgcattatcagagcctcttgcttaccgaacgcgtgacttttgctccacctgcagccttaaaccccgcaacccttttacccgaagaaacagatgagcctgtgacgcatgactgtcatgaactcttgattgaagaaactggcgtacgcaaggacctcaccgatattccattaacaggtgaggtacttacgtggtttaccgaggggtcctcttatgtcgtcgaaggcaaacgtatggctggtgccgccgttgttgatggcacccgtactatctgggcaagcagcttacccgaaggcacgagtgctcagaaagcagagttgatggccttgacccaagccttacgccttgctgaagggaaatcgatcaatatttacaccgattcacgctatgcattcgccacggcacatgtacacggtgccatctacaaacaacgtggtttgttaacttctgctggccgcgagattaagaacaaagaagaaatcctttccttacttgaagccttacacctccccaaacgtctcgctattattcattgtccagggcatcagaaagcaaaagatcctatcagccgtgggaatcaaatggcagatcgtgtcgctaaacaggcagcccaaggcgttaacttgttgcccatgattgagacccctaaagctcca

SEQ ID NO: 452 - protein, 687 aa, synthetic construct
  REGION 1..687: note = Engineered reverse transcriptase variants
MHHHHHHGGSGVLTLQLDDEYRLYSPLVKPDQNIQFWLEQFPQAWAETGGMGLAKQVPPQVIQLKASATPVSVRQYPLSKEACEGIRPHVQRLIQQGILVPVQSPWNTPLLPVRKPGTNDYRPVQDLRESNKRVQDIHPTVPNPYNLLCALPPQRSWYTVLDLKDAFFCLRLHPTSQPLFAFEWRDPDTGRTGQLTWTRLPQGFKNSPTIFDEALHRDLANFRIQHPQVTLLQYVDDLLLAGATKQDCLEGTKALLLELSDLGYRVSAKKAQICRREVTYLGYSLRDGQRWLTEARKKTVVQIPAPKTAKQMREFLGTAGFCRLWIPGFATLAAPLYPLTKEKGEFSWAPEHQKAFDAIKKALLSAPALALPDVTKPFTLYVDERKGVARGVLTQTLGPWRRPVAYLSKKLDPVASGWPVCLKAIAAVAILVKDADKLTLGQNITVIAPHALENIVRQPPDRWMTNARMTHYQSLLLTERVTFAPPAALNPATLLPEETDEPVTHDCHELLIEETGVRKDLTDIPLTGEVLTWFTEGSSYVVEGKRMAGAAVVDGTRTIWASSLPEGTSAQKAELMALTQALRLAEGKSINIYTDSRYAFATAHVHGAIYKQRGLLTSAGREIKNKEEILSLLEALHLPKRLAIIHCPGHQKAKDPISRGNQMADRVAKQAAQGVNLLPMIETPKAP

SEQ ID NO: 453 - DNA, 2061 bp, synthetic construct
  misc_feature 1..2061: note = Engineered reverse transcriptase variants
  source 1..2061: mol_type = other DNA
atgcatcaccatcaccatcatggtggtagcggagtgctgacccttcagctggatgatgaatatcgcttgtacagtccgctggtcaaaccagaccaaaacattcagttctggctcgaacagtttccgcaagcgtgggctgaaactggtggcatgggcctggccaaacaggttcctcctcaggtaatccagttaaaggcatctgccacgccggtgtcagttcgtcagtatccgctgtcgaaagaagcgcaggaggggattcgcccacacgtgcagcgtttgatccagcagggcattctggtaccggttcaaagcccctggaataccccgcttttaccagtcggtaaaccgggtacaaacgattaccgtcctgtgcaagacctgcgcgaagtcaataaacgtgtgcaggatatccacccaaccgttccgaacccgtataatctgttgtgcgcgttaccgccgcagcgttcctggtacacggtgctggacctgaaggacgcgttcttctgtcttcgcctccatcccaccagccagccactgtttgcctttgaatggcgcgatcctgatacgggccgtactgggcaattaacatggacccgtttgccgcagggctttaagaacagtcccacgatctttgatgaggctcttcaccgcgacctcgcaaatttccgcatccaacacccacaggtaacgttactccagtatgtcgatgatcttttgttagcgggtgccaccaaacaggactgcttggaaggaacgaaagcacttctcttggaactcagtgatttaggttatcgtgtgtccgccaagaaagctcagatttgtcgccgcgaagtgacatacttaggctattcattgcgtgatggtcaacgttggcttactgaggcgcgcaagcgtaccgtcgttcaaatccccgcccctaagactgaaaaacagatgcgtgaatttcttggcacggcaggtttctgccgtttgtggattcctggctttgctacgttagcggcacccctctatccactcacgaaagagaaaggagaattctcttgggccccagaacatcagaaagcgtttgacgccatcaagaaagcgttattaagcgctcctgctcttgcattgcccgatgtcaccaaaccattcacgctctacgtggatgaacgcaaaggcgtagcccgcggtgtgttgacacagaccttaggaccttggcgtcgtcccgtggcctacctctcgaagaaacttgacccagttgcaagtggttggcctgtctgcttgaaagctattgccgcagttgcaatcctcgtcaaagatgccgacaaacttactttgggccagaacctgactgttattgcaccacacgcccttgaaaacatcgttcgtcagccacctgatcgctggatgaccaatgctcgcatgacgcattatcagagcctcttgcttaccgaacgcgtgacttttgctccacctgcagccttaaaccccgcaacccttttacccgaagaaacagatgagcctgtgacgcatgactgtcatgaactcttgattgaagaaactggcgtacgcaaggacctcaccgatattccattaacaggtgaggtacttacgtggtttaccgaggggtcctcttatgtcgtcgaaggcaaacgtatggctggtgccgccgttgttgatggcacccgtactatctgggcaagcagcttacccgaaggcacgagtgctcagaaagcagagttgatggccttgacccaagccttacgccttgctgaagggaaatcgatcaatatttacaccgattcacgctatgcattcgccacggcacatgtacacggtgccatctacaaacaacgtggtttgttaacttctgctggccgcgagattaagaacaaagaagaaatcctttccttacttgaagccttacacctccccaaacgtctcgctattattcattgtccagggcatcagaaagcaaaagatcctatcagccgtgggaatcaaatggcagatcgtgtcgctaaacaggcagcccaaggcgttaacttgttgcccatgattgagacccctaaagctcca

SEQ ID NO: 454 - protein, 687 aa, synthetic construct
  REGION 1..687: note = Engineered reverse transcriptase variants
MHHHHHHGGSGVLTLQLDDEYRLYSPLVKPDQNIQFWLEQFPQAWAETGGMGLAKQVPPQVIQLKASATPVSVRQYPLSKEAQEGIRPHVQRLIQQGILVPVQSPWNTPLLPVGKPGTNDYRPVQDLREVNKRVQDIHPTVPNPYNLLCALPPQRSWYTVLDLKDAFFCLRLHPTSQPLFAFEWRDPDTGRTGQLTWTRLPQGFKNSPTIFDEALHRDLANFRIQHPQVTLLQYVDDLLLAGATKQDCLEGTKALLLELSDLGYRVSAKKAQICRREVTYLGYSLRDGQRWLTEARKRTVVQIPAPKTEKQMREFLGTAGFCRLWIPGFATLAAPLYPLTKEKGEFSWAPEHQKAFDAIKKALLSAPALALPDVTKPFTLYVDERKGVARGVLTQTLGPWRRPVAYLSKKLDPVASGWPVCLKAIAAVAILVKDADKLTLGQNLTVIAPHALENIVRQPPDRWMTNARMTHYQSLLLTERVTFAPPAALNPATLLPEETDEPVTHDCHELLIEETGVRKDLTDIPLTGEVLTWFTEGSSYVVEGKRMAGAAVVDGTRTIWASSLPEGTSAQKAELMALTQALRLAEGKSINIYTDSRYAFATAHVHGAIYKQRGLLTSAGREIKNKEEILSLLEALHLPKRLAIIHCPGHQKAKDPISRGNQMADRVAKQAAQGVNLLPMIETPKAP

SEQ ID NO: 455 - DNA, 2061 bp, synthetic construct
  misc_feature 1..2061: note = Engineered reverse transcriptase variants
  source 1..2061: mol_type = other DNA
atgcatcaccatcaccatcatggtggtagcggagtgctgacccttcagctggatgatgaatatcgcttgtacagtccgctggtcaaaccagaccaaaacattcagttctggctcgaacagtttccgcaagcgtgggctgaaactggtggcatgggcctggccaaacaggttcctcctcaggtaatccagttaaaggcatctgccacgccggtgtcagttcgtcagtatccgctgtcgaaagaagcgcaggaggggattcgcccacacgtgcagcgtttgatccagcagggcattctggtaccggttcaaagcccctggaataccccgcttttaccagtcggtaaaccgggtacaaacgattaccgtcctgtgcaagacctgcgcgaagtcaataaacgtgtgcaggatatccacccaaccgttccgaacccgtataatctgttgtgcgcgttaccgccgcagcgttcctggtacacggtgctggacctgaaggacgcgttcttctgtcttcgcctccatcccaccagccagccactgtttgcctttgaatggcgcgatcctgatacgggccgtactgggcaattaacatggacccgtttgccgcagggctttaagaacagtcccacgatctttgatgaggctcttcaccgcgacctcgcaaatttccgcatccaacacccacaggtaacgttactccagtatgtcgatgatcttttgttagcgggtgccaccaaacaggactgcttggaaggaacgaaagcacttctcttggaactcagtgatttaggttatcgtgtgtccgccaagaaagctcagatttgtcgccgcgaagtgacatacttaggctattcattgcgtgatggtcaacgttggcttactgaggcgcgcaagcgtaccgtcgttcaaatccccgcccctaagactgaaaaacagatgcgtgaatttcttggcacggcaggtttctgccgtttgtggattcctggctttgctacgttagcggcacccctctatccactcacgaaagagaaaggagaattctcttgggccccagaacatcagaaagcgtttgacgccatcaagaaagcgttattaagcgctcctgctcttgcattgcccgatgtcaccaaaccattcacgctctacgtggatgaacgcaaaggcgtagcccgcggtgtgttgacacagaccttaggaccttggcgtcgtcccgtggcctacctctcgaagaaacttgacccagttgcaagtggttggcctgtctgcttgaaagctattgccgcagttgcaatcctcgtcaaagatgccgacaaacttactttgggccagaacctgactgttattgcaccacacgcccttgaaaacatcgttcgtcagccacctgatcgctggatgaccaatgctcgcatgacgcattatcagagcctcttgcttaccgaacgcgtgacttttgctccacctgcagccttaaaccccgcaacccttttacccgaagaaacagatgagcctgtgacgcatgactgtcatcaactcttgattgaagaaactggcgtacgcaaggacctcaccgatattccattaacaggtgaggtacttacgtggtttaccgaggggtcctcttatgtcgtcgaaggcaaacgtatggctggtgccgccgttgttgatggcacccgtactatctgggcaagcagcttacccgaaggcacgagtgctcagaaagcagagttgatggccttgacccaagccttacgccttgctgaagggaaatcgatcaatatttacaccgattcacgctatgcattcgccacggcacatgtacacggtgccatctacaaacaacgtggtttgttaacttctgctggccgcgagattaagaacaaagaagaaatcctttccttacttgaagccttacacctccccaaacgtctcgctattattcattgtccagggcatcagaaagcaaaagatcctatcagccgtgggaatcaaatggcagatcgtgtcgctaaacaggcagcccaaggcgttaacttgttgcccatgattgagacccctaaagctcca

SEQ ID NO: 456 - protein, 687 aa, synthetic construct
  REGION 1..687: note = Engineered reverse transcriptase variants
MHHHHHHGGSGVLTLQLDDEYRLYSPLVKPDQNIQFWLEQFPQAWAETGGMGLAKQVPPQVIQLKASATPVSVRQYPLSKEAQEGIRPHVQRLIQQGILVPVQSPWNTPLLPVGKPGTNDYRPVQDLREVNKRVQDIHPTVPNPYNLLCALPPQRSWYTVLDLKDAFFCLRLHPTSQPLFAFEWRDPDTGRTGQLTWTRLPQGFKNSPTIFDEALHRDLANFRIQHPQVTLLQYVDDLLLAGATKQDCLEGTKALLLELSDLGYRVSAKKAQICRREVTYLGYSLRDGQRWLTEARKRTVVQIPAPKTEKQMREFLGTAGFCRLWIPGFATLAAPLYPLTKEKGEFSWAPEHQKAFDAIKKALLSAPALALPDVTKPFTLYVDERKGVARGVLTQTLGPWRRPVAYLSKKLDPVASGWPVCLKAIAAVAILVKDADKLTLGQNLTVIAPHALENIVRQPPDRWMTNARMTHYQSLLLTERVTFAPPAALNPATLLPEETDEPVTHDCHQLLIEETGVRKDLTDIPLTGEVLTWFTEGSSYVVEGKRMAGAAVVDGTRTIWASSLPEGTSAQKAELMALTQALRLAEGKSINIYTDSRYAFATAHVHGAIYKQRGLLTSAGREIKNKEEILSLLEALHLPKRLAIIHCPGHQKAKDPISRGNQMADRVAKQAAQGVNLLPMIETPKAP

SEQ ID NO: 457 - DNA, 2061 bp, synthetic construct
  misc_feature 1..2061: note = Engineered reverse transcriptase variants
  source 1..2061: mol_type = other DNA
atgcatcaccatcaccatcatggtggtagcggagtgctgacccttcagctggatgatgaatatcgcttgtacagtccgctggtcaaaccagaccaaaacattcagttctggctcgaacagtttccgcaagcgtgggctgaaactggtggcatgggcctggccaaacaggttcctcctcaggtaatccagttaaaggcatctgccacgccggtgtcagttcgtcagtatccgctgtcgaaagaagcgcaggaggggattcgcccacacgtgcagcgtttgatccagcagggcattctggtaccggttcaaagcccctggaataccccgcttttaccagtcggtaaaccgggtacaaacgattaccgtcctgtgcaagacctgcgcgaagtcaataaacgtgtgcaggatatccacccaaccgttccgaacccgtataatctgttgtgcgcgttaccgccgcagcgttcctggtacacggtgctggacctgaaggacgcgttcttctgtcttcgcctccatcccaccagccagccactgtttgcctttgaatggcgcgatcctgatacgggccgtactgggcaattaacatggacccgtttgccgcagggctttaagaacagtcccacgatctttaaggaggctcttcaccgcgacctcgcaaatttccgcatccaacacccacaggtaacgttactccagtatgtcgatgatcttttgttagcgggtgccaccaaacaggactgcttggaaggaacgaaagcacttctcttggaactcagtgatttaggttatcgtgtgtccgccaagaaagctcagatttgtcgccgcgaagtgacatacttaggctattcattgcgtgatggtcaacgttggcttactgaggcgcgcaagcgtaccgtcgttcaaatccccgcccctaagactgaaaaacagatgcgtgaatttcttggcacggcaggtttctgccgtttgtggattcctggctttgctacgttagcggcacccctctatccactcacgaaatggaaaggagaattctcttgggccccagaacatcagaaagcgtttgacgccatcaagaaagcgttattaagcgctcctgctcttgcattgcccgatgtcaccaaaccattcacgctctacgtggatgaacgcaaaggcgtagcccgcggtgtgttgacacagaccttaggaccttggcgtcgtcccgtggcctacctctcgaagaaacttgacccagttgcaagtggttggcctgtctgcttgaaagctattgccgcagttgcaatcctcgtcaaagatgccgacaaacttactttgggccagaacctgactgttattgcaccacacgcccttgaaaacatcgttcgtcagccacctgatcgctggatgaccaatgctcgcatgacgcattatcagagcctcttgcttaccgaacgcgtgacttttgctccacctgcagccttaaaccccgcaacccttttacccgaagaaacagatgagcctgtgacgcatgactgtcatgaactcttgattgaagaaactggcgtacgcaaggacctcaccgatattccattaacaggtgaggtacttacgtggtttaccgaggggtcctcttatgtcgtcgaaggcaaacgtatggctggtgccgccgttgttgatggcacccgtactatctgggcaagcagcttacccgaaggcacgagtgctcagaaagcagagttgatggccttgacccaagccttacgccttgctgaagggaaatcgatcaatatttacaccgattcacgctatgcattcgccacggcacatgtacacggtgccatctacaaacaacgtggtttgttaacttctgctggccgcgagattaagaacaaagaagaaatcctttccttacttgaagccttacacctccacaaacgtctcgctattattcattgtccagggcatcagaaagcaaaagatcctatcagccgtgggaatcaaatggcagatcgtgtcgctaaacaggcagcccaaggcgttaacttgttgcccatgattgagacccctaaagctcca

SEQ ID NO: 458 - protein, 687 aa, synthetic construct
  REGION 1..687: note = Engineered reverse transcriptase variants
MHHHHHHGGSGVLTLQLDDEYRLYSPLVKPDQNIQFWLEQFPQAWAETGGMGLAKQVPPQVIQLKASATPVSVRQYPLSKEAQEGIRPHVQRLIQQGILVPVQSPWNTPLLPVGKPGTNDYRPVQDLREVNKRVQDIHPTVPNPYNLLCALPPQRSWYTVLDLKDAFFCLRLHPTSQPLFAFEWRDPDTGRTGQLTWTRLPQGFKNSPTIFKEALHRDLANFRIQHPQVTLLQYVDDLLLAGATKQDCLEGTKALLLELSDLGYRVSAKKAQICRREVTYLGYSLRDGQRWLTEARKRTVVQIPAPKTEKQMREFLGTAGFCRLWIPGFATLAAPLYPLTKWKGEFSWAPEHQKAFDAIKKALLSAPALALPDVTKPFTLYVDERKGVARGVLTQTLGPWRRPVAYLSKKLDPVASGWPVCLKAIAAVAILVKDADKLTLGQNLTVIAPHALENIVRQPPDRWMTNARMTHYQSLLLTERVTFAPPAALNPATLLPEETDEPVTHDCHELLIEETGVRKDLTDIPLTGEVLTWFTEGSSYVVEGKRMAGAAVVDGTRTIWASSLPEGTSAQKAELMALTQALRLAEGKSINIYTDSRYAFATAHVHGAIYKQRGLLTSAGREIKNKEEILSLLEALHLHKRLAIIHCPGHQKAKDPISRGNQMADRVAKQAAQGVNLLPMIETPKAP

SEQ ID NO: 459 - DNA, 2061 bp, synthetic construct
  misc_feature 1..2061: note = Engineered reverse transcriptase variants
  source 1..2061: mol_type = other DNA
atgcatcaccatcaccatcatggtggtagcggagtgctgacccttcagctggatgatgaatatcgcttgtacagtccgctggtcaaaccagaccaaaacattcagttctggctcgaacagtttccgcaagcgtgggctgaaactggtggcatgggcctggccaaacaggttcctcctcaggtaatccagttaaaggcatctgccacgccggtgtcagttcgtcagtatccgctgtcgaaagaagcgcaagaggggattcgcccacacgtgcagcgtttgatccagcagggcattctggtaccggttcaaagcccctggaataccccgcttttaccagtcggtaaaccgggtacaaacgattaccgtcctgtgcaagacctgcgcgaagtcaataaacgtgtgcaggatatccacccaaccgttccgaacccgtataatctgttgtgcgcgttaccgccgcagcgttcctggtacacggtgctggacctgaaggacgcgttcttctgtcttcgcctccatcccaccagccagccactgtttgcctttgaatggcgcgatcctgatacgggccgtactgggcaattaacatggacccgtttgccgcagggctttatgaacagtcccacgatctttgatgaggctcttcaccgcgacctcgcaaatttccgcatccaacacccacaggtaacgttactccagtatgtcgatgatcttttgttagcgggtgccaccaaacaggactgcttggaaggaacgaaagcacttctcttggaactcagtgatttaggttatcgtgtgtccgccaagaaagctcagatttgtcgccgcgaagtgacatacttaggctattcattgcgtgatggtcaacgttggcttactgaggcgcgcaagcgtaccgtcgttcaaatccccgcccctaagaccgcgaaacagatgcgtgaatttcttggcacggcaggtttctgccgtttgtggattcctggctttgctacgttagcggcacccctctatccactcacgaaagagaaaggagaattctcttgggccccagaacatcagaaagcgtttgacgccatcaagaaagcgttattaagcgctcctgctcttgcattgcccgatgtcaccaaaccattcacgctctacgtggatgaacgcaaaggcgtagcccgcggtgtgttgacacagaccttaggaccttggcgtcgtcccgtggcctacctctcgaagaaacttgacccagttgcaagtggttggcctgtctgcttgaaagctattgccgcagttgcaatcctcgtcaaagatgccgacaaacttactttgggccagaacattactgttattgcaccacacgcccttgaaaacatcgttcgtcagccacctgatcgctggatgaccaatgctcgcatgacgcattatcagagcctcttgcttaccgaacgcgtgacttttgctccacctgcagccttaaaccccgcaacccttttacccgaagaaacagatgagcctgtgacgcatgactgtcatgaactcttgattgaagaaactggcgtacgcaaggacctcaccgatattccattaacaggtgaggtacttacgtggtttaccgaggggtcctcttatgtcgtcgaaggcaaacgtatggctggtgccgccgttgttgatggcacccgtactatctgggcaagcagcttacccgaaggcacgagtgctcagaaagcagagttgatggccttgacccaagccttacgccttgctgaagggaaatcgatcaatatttacaccgattcacgctatgcattcgccacggcacatgtacacggtgccatctacaaacaacgtggtttgttaacttctgctggccgcgagattaagaacaaagaagaaatcctttccttacttgaagccttacacctccccaaacgtctcgctattattcattgtccagggcatcagaaagcaaaagatcctatcagccgtgggaatcaaatggcagatcgtgtcgctaaacaggcagcccaaggcgttaacttgttgcccatgattgagacccctaaagctcca

SEQ ID NO: 460 - protein, 687 aa, synthetic construct
  REGION 1..687: note = Engineered reverse transcriptase variants
MHHHHHHGGSGVLTLQLDDEYRLYSPLVKPDQNIQFWLEQFPQAWAETGGMGLAKQVPPQVIQLKASATPVSVRQYPLSKEAQEGIRPHVQRLIQQGILVPVQSPWNTPLLPVGKPGTNDYRPVQDLREVNKRVQDIHPTVPNPYNLLCALPPQRSWYTVLDLKDAFFCLRLHPTSQPLFAFEWRDPDTGRTGQLTWTRLPQGFMNSPTIFDEALHRDLANFRIQHPQVTLLQYVDDLLLAGATKQDCLEGTKALLLELSDLGYRVSAKKAQICRREVTYLGYSLRDGQRWLTEARKRTVVQIPAPKTAKQMREFLGTAGFCRLWIPGFATLAAPLYPLTKEKGEFSWAPEHQKAFDAIKKALLSAPALALPDVTKPFTLYVDERKGVARGVLTQTLGPWRRPVAYLSKKLDPVASGWPVCLKAIAAVAILVKDADKLTLGQNITVIAPHALENIVRQPPDRWMTNARMTHYQSLLLTERVTFAPPAALNPATLLPEETDEPVTHDCHELLIEETGVRKDLTDIPLTGEVLTWFTEGSSYVVEGKRMAGAAVVDGTRTIWASSLPEGTSAQKAELMALTQALRLAEGKSINIYTDSRYAFATAHVHGAIYKQRGLLTSAGREIKNKEEILSLLEALHLPKRLAIIHCPGHQKAKDPISRGNQMADRVAKQAAQGVNLLPMIETPKAP

SEQ ID NO: 461 - DNA, 2061 bp, synthetic construct
  misc_feature 1..2061: note = Engineered reverse transcriptase variants
  source 1..2061: mol_type = other DNA
atgcatcaccatcaccatcatggtggtagcggagtgctgacccttcagctggatgatgaatatcgcttgtacagtccgctggtcaaaccagaccaaaacattcagttctggctcgaacagtttccgcaagcgtgggctgaaactggtggcatgggcctggccaaacaggttcctcctcaggtaatccagttaaaggcatctgccacgccggtgtcagttcgtcagtatccgctgtcgaaagaagcgcaggaggggattcgcccacacgtgcagcgtttgatccagcagggcattctggtaccggttcaaagcccctggaataccccgcttttaccagtcggtaaaccgggtacaaacgattaccgtcctgtgcaagacctgcgcgaagtcaataaacgtgtgcaggatatccacccaaccgttccgaacccgtataatctgttgtgcgcgttaccgccgcagcgttcctggtacacggtgctggacctgaaggacgcgttcttctgtcttcgcctccatcccaccagccagccactgtttgcctttgaatggcgcgatcctgatacgggccgtactgggcaattaacatggacccgtttgccgcagggctttaagaacagtcccacgatctttgacgaggctcttcaccgcgacctcgcaaatttccgcatccaacacccacaggtaacgttactccagtatgtcgatgatcttttgttagcgggtgccaccaaacaggactgcttggaaggaacgaaagcacttctcttggaactcagtgatttaggttatcgtgtgtccgccaagaaagctcagatttgtcgccgcgaagtgacatacttaggctattcattgcgtgatggtcaacgttggcttactgaggcgcgcaagaagaccgtcgttcaaatccccgcccctaagaccgcgaaacagatgcgtgaatttcttggcacggcaggtttctgccgtttgtggattcctggctttgctacgttagcggcacccctctatccactcacgaaagagaaaggagaattctcttgggccccagaacatcagaaagcgtttgacgccatcaagaaagcgttattaagcgctcctgctcttgcattgcccgatgtcaccaaaccattcacgctctacgtggatgaacgcaaaggcgtagcccgcggtgtgttgacacagaccttaggaccttggcgtcgtcccgtggcctacctctcgaagaaacttgacccagttgcaagtggttggcctgtctgcttgaaagctattgccgcagttgcaatcctcgtcaaagatgccgacaaacttactttgggccagaacctgactgttattgcaccacacgcccttgaaaacatcgttcgtcagccacctgatcgctggatgaccaatgctcgcatgacgcattatcagagcctcttgcttaccgaacgcgtgacttttgctccacctgcagccttaaaccccgcaacccttttacccgaagaaacagatgagcctgtgacgcatgactgtcatgaactcttgattgaagaaactggcgtacgcaaggacctcaccgatattccattaacaggtgaggtacttacgtggtttaccgaggggtcctcttatgtcgtcgaaggcaaacgtatggctggtgccgccgttgttgatggcacccgtactatctgggcaagcagcttacccgaaggcacgagtgctcagaaagcagagttgatggccttgacccaagccttacgccttgctgaagggaaatcgatcaatatttacaccgattcacgctatgcattcgccacggcacatgtacacggtgccatctacaaacaacgtggtttgttaacttctgctggccgcgagattaagaacaaagaagaaatcctttccttacttgaagccttacacctccccaaacgtctcgctattattcattgtccagggcatcagaaagcaaaagatcctatcagccgtgggaatcaaatggcagatcgtgtcgctaaacaggcagcccaaggcgttaacttgttgcccatgattgagacccctaaagctcca

SEQ ID NO: 462 - protein, 687 aa, synthetic construct
  REGION 1..687: note = Engineered reverse transcriptase variants
MHHHHHHGGSGVLTLQLDDEYRLYSPLVKPDQNIQFWLEQFPQAWAETGGMGLAKQVPPQVIQLKASATPVSVRQYPLSKEAQEGIRPHVQRLIQQGILVPVQSPWNTPLLPVGKPGTNDYRPVQDLREVNKRVQDIHPTVPNPYNLLCALPPQRSWYTVLDLKDAFFCLRLHPTSQPLFAFEWRDPDTGRTGQLTWTRLPQGFKNSPTIFDEALHRDLANFRIQHPQVTLLQYVDDLLLAGATKQDCLEGTKALLLELSDLGYRVSAKKAQICRREVTYLGYSLRDGQRWLTEARKKTVVQIPAPKTAKQMREFLGTAGFCRLWIPGFATLAAPLYPLTKEKGEFSWAPEHQKAFDAIKKALLSAPALALPDVTKPFTLYVDERKGVARGVLTQTLGPWRRPVAYLSKKLDPVASGWPVCLKAIAAVAILVKDADKLTLGQNLTVIAPHALENIVRQPPDRWMTNARMTHYQSLLLTERVTFAPPAALNPATLLPEETDEPVTHDCHELLIEETGVRKDLTDIPLTGEVLTWFTEGSSYVVEGKRMAGAAVVDGTRTIWASSLPEGTSAQKAELMALTQALRLAEGKSINIYTDSRYAFATAHVHGAIYKQRGLLTSAGREIKNKEEILSLLEALHLPKRLAIIHCPGHQKAKDPISRGNQMADRVAKQAAQGVNLLPMIETPKAP

SEQ ID NO: 463 - DNA, 2061 bp, synthetic construct
  misc_feature 1..2061: note = Engineered reverse transcriptase variants
  source 1..2061: mol_type = other DNA
atgcatcaccatcaccatcatggtggtagcggagtgctgacccttcagctggatgatgaatatcgcttgtacagtccgctggtcaaaccagaccaaaacattcagttctggctcgaacagtttccgcaagcgtgggctgaaactggtggcatgggcctggccaaacaggttcctcctcaggtaatccagttaaaggcatctgccacgccggtgtcagttcgtcagtatccgctgtcgaaagaagcgcaggaggggattcgcccacacgtgcagcgtttgatccagcagggcattctggtaccggttcaaagcccctggaataccccgcttttaccagtcggtaaaccgggtacaaacgattaccgtcctgtgcaagacctgcgcgaaagcaataaacgtgtgcaggatatccacccaaccgttccgaacccgtataatctgttgtgcgcgttaccgccgcagcgttcctggtacacggtgctggacctgaaggacgcgttcttctgtcttcgcctccatcccaccagccagccactgtttgcctttgaatggcgcgatcctgatacgggccgtactgggcaattaacatggacccgtttgccgcagggctttaagaacagtcccacgatctttgatgaggctcttcaccgcgacctcgcaaatttccgcatccaacacccacaggtaacgttactccagtatgtcgatgatcttttgttagcgggtgccaccaaacaggactgcttggaaggaacgaaagcacttctcttggaactcagtgatttaggttatcgtgtgtccgccaagaaagctcagatttgtcgccgcgaagtgacatacttaggctattcattgcgtgatggtcaacgttggcttactgaggcgcgcaagcgcaccgtcgttcaaatccccgcccctaagaccgcgaaacagatgcgtgaatttcttggcacgtcgggtttctgccgtttgtggattcctggctttgctacgttagcggcacccctctatccactcacgaaagagaaaggagaattctcttgggccccagaacatcagaaagcgtttgacgccatcaagaaagcgttattaagcgctcctgctcttgcattgcccgatgtcaccaaaccattcacgctctacgtggatgaacgcaaaggcgtagcccgcggtgtgttgacacagaccttaggaccttggcgtcgtcccgtggcctacctctcgaagaaacttgacccagttgcaagtggttggcctgtctgcttgaaagctattgccgcagttgcaatcctcgtcaaagatgccgacaaacttactttgggccagaacattactgttattgcaccacacgcccttgaaaacatcgttcgtcagccacctgatcgctggatgaccaatgctcgcatgacgcattatcagagcctcttgcttaccgaacgcgtgacttttgctccacctgcagccttaaaccccgcaacccttttacccgaagaaacagatgagcctgtgacgcatgactgtcatgaactcttgattgaagaaactggcgtacgcaaggacctcaccgatattccattaacaggtgaggtacttacgtggtttaccgaggggtcctcttatgtcgtcgaaggcaaacgtatggctggtgccgccgttgttgatggcacccgtactatctgggcaagcagcttacccgaaggcacgagtgctcagaaagcagagttgatggccttgacccaagccttacgccttgctgaagggaaatcgatcaatatttacaccgattcacgctatgcattcgccacggcacatgtacacggtgccatctacaaacaacgtggtttgttaacttctgctggccgcgagattaagaacaaagaagaaatcctttccttacttgaagccttacacctccccaaacgtctcgctattattcattgtccagggcatcagaaagcaaaagatcctatcagccgtgggaatcaaatggcagatcgtgtcgctaaacaggcagcccaaggcgttaacttgttgcccatgattgagacccctaaagctcca

SEQ ID NO: 464 - protein, 687 aa, synthetic construct
  REGION 1..687: note = Engineered reverse transcriptase variants
MHHHHHHGGSGVLTLQLDDEYRLYSPLVKPDQNIQFWLEQFPQAWAETGGMGLAKQVPPQVIQLKASATPVSVRQYPLSKEAQEGIRPHVQRLIQQGILVPVQSPWNTPLLPVGKPGTNDYRPVQDLRESNKRVQDIHPTVPNPYNLLCALPPQRSWYTVLDLKDAFFCLRLHPTSQPLFAFEWRDPDTGRTGQLTWTRLPQGFKNSPTIFDEALHRDLANFRIQHPQVTLLQYVDDLLLAGATKQDCLEGTKALLLELSDLGYRVSAKKAQICRREVTYLGYSLRDGQRWLTEARKRTVVQIPAPKTAKQMREFLGTSGFCRLWIPGFATLAAPLYPLTKEKGEFSWAPEHQKAFDAIKKALLSAPALALPDVTKPFTLYVDERKGVARGVLTQTLGPWRRPVAYLSKKLDPVASGWPVCLKAIAAVAILVKDADKLTLGQNITVIAPHALENIVRQPPDRWMTNARMTHYQSLLLTERVTFAPPAALNPATLLPEETDEPVTHDCHELLIEETGVRKDLTDIPLTGEVLTWFTEGSSYVVEGKRMAGAAVVDGTRTIWASSLPEGTSAQKAELMALTQALRLAEGKSINIYTDSRYAFATAHVHGAIYKQRGLLTSAGREIKNKEEILSLLEALHLPKRLAIIHCPGHQKAKDPISRGNQMADRVAKQAAQGVNLLPMIETPKAP

SEQ ID NO: 465 - DNA, 2061 bp, synthetic construct
  misc_feature 1..2061: note = Engineered reverse transcriptase variants
  source 1..2061: mol_type = other DNA
atgcatcaccatcaccatcatggtggtagcggagtgctgacccttcagctggatgatgaatatcgcttgtacagtccgctggtcaaaccagaccaaaacattcagttctggctcgaacagtttccgcaagcgtgggctgaaactggtggcatgggcctggccaaacaggttcctcctcaggtaatccagttaaaggcatctgccacgccggtgtcagttcgtcagtatccgctgtcgaaagaagcgcaagaggggattcgcccacacgtgcagcgtttgatccagcagggcattctggtaccggttcaaagcccctggaataccccgcttttaccagtcggtaaaccgggtacaaacgattaccgtcctgtgcaagacctgcgcgaaagcaataaacgtgtgcaggatatccacccaaccgttccgaacccgtataatctgttgtgcgcgttaccgccgcagcgttcctggtacacggtgctggacctgaaggacgcgttcttctgtcttcgcctccatcccaccagccagccactgtttgcctttgaatggcgcgatcctgatacgggccgtactgggcaattaacatggacccgtttgccgcagggctttaagaacagtcccacgatctttaaggaggctcttcaccgcgacctcgcaaatttccgcatccaacacccacaggtaacgttactccagtatgtcgatgatcttttgttagcgggtgccaccaaacaggactgcttggaaggaacgaaagcacttctcttggaactcagtgatttaggttatcgtgtgtccgccaagaaagctcagatttgtcgccgcgaagtgacatacttaggctattcattgcgtgatggtcaacgttggcttactgaggcgcgcaagaagaccgtcgttcaaatccccgcccctaagaccgcgaaacagatgcgtgaatttcttggcacggcaggtttctgccgtttgtggattcctggctttgctacgttagcggcacccctctatccactcacgaaatggaaaggagaattctcttgggccccagaacatcagaaagcgtttgacgccatcaagaaagcgttattaagcgctcctgctcttgcattgcccgatgtcaccaaaccattcacgctctacgtggatgaacgcaaaggcgtagcccgcggtgtgttgacacagaccttaggaccttggcgtcgtcccgtggcctacctctcgaagaaacttgacccagttgcaagtggttggcctgtctgcttgaaagctattgccgcagttgcaatcctcgtcaaagatgccgacaaacttactttgggccagaacctgactgttattgcaccacacgcccttgaaaacatcgttcgtcagccacctgatcgctggatgaccaatgctcgcatgacgcattatcagagcctcttgcttaccgaacgcgtgacttttgctccacctgcagccttaaaccccgcaacccttttacccgaagaaacagatgagcctgtgacgcatgactgtcatgaactcttgattgaagaaactggcgtacgcaaggacctcaccgatattccattaacaggtgaggtacttacgtggtttaccgaggggtcctcttatgtcgtcgaaggcaaacgtatggctggtgccgccgttgttgatggcacccgtactatctgggcaagcagcttacccgaaggcacgagtgctcagaaagcagagttgatggccttgacccaagccttacgccttgctgaagggaaatcgatcaatatttacaccgattcacgctatgcattcgccacggcacatgtacacggtgccatctacaaacaacgtggtttgttaacttctgctggccgcgagattaagaacaaagaagaaatcctttccttacttgaagccttacacctccccaaacgtctcgctattattcattgtccagggcatcagaaagcaaaagatcctatcagccgtgggaatcaaatggcagatcgtgtcgctaaacaggcagcccaaggcgttaacttgttgcccatgattgagacccctaaagctcca

SEQ ID NO: 466 - protein, 687 aa, synthetic construct
  REGION 1..687: note = Engineered reverse transcriptase variants
MHHHHHHGGSGVLTLQLDDEYRLYSPLVKPDQNIQFWLEQFPQAWAETGGMGLAKQVPPQVIQLKASATPVSVRQYPLSKEAQEGIRPHVQRLIQQGILVPVQSPWNTPLLPVGKPGTNDYRPVQDLRESNKRVQDIHPTVPNPYNLLCALPPQRSWYTVLDLKDAFFCLRLHPTSQPLFAFEWRDPDTGRTGQLTWTRLPQGFKNSPTIFKEALHRDLANFRIQHPQVTLLQYVDDLLLAGATKQDCLEGTKALLLELSDLGYRVSAKKAQICRREVTYLGYSLRDGQRWLTEARKKTVVQIPAPKTAKQMREFLGTAGFCRLWIPGFATLAAPLYPLTKWKGEFSWAPEHQKAFDAIKKALLSAPALALPDVTKPFTLYVDERKGVARGVLTQTLGPWRRPVAYLSKKLDPVASGWPVCLKAIAAVAILVKDADKLTLGQNLTVIAPHALENIVRQPPDRWMTNARMTHYQSLLLTERVTFAPPAALNPATLLPEETDEPVTHDCHELLIEETGVRKDLTDIPLTGEVLTWFTEGSSYVVEGKRMAGAAVVDGTRTIWASSLPEGTSAQKAELMALTQALRLAEGKSINIYTDSRYAFATAHVHGAIYKQRGLLTSAGREIKNKEEILSLLEALHLPKRLAIIHCPGHQKAKDPISRGNQMADRVAKQAAQGVNLLPMIETPKAP

SEQ ID NO: 467 - DNA, 2061 bp, synthetic construct
  misc_feature 1..2061: note = Engineered reverse transcriptase variants
  source 1..2061: mol_type = other DNA
atgcatcaccatcaccatcatggtggtagcggagtgctgacccttcagctggatgatgaatatcgcttgtacagtccgctggtcaaaccagaccaaaacattcagttctggctcgaacagtttccgcaagcgtgggctgaaactggtggcatgggcctggccaaacaggttcctcctcaggtaatccagttaaaggcatctgccacgccggtgtcagttcgtcagtatccgctgtcgaaagaagcgcaggaggggattcgcccacacgtgcagcgtttgatccagcagggcattctggtaccggttcaaagcccctggaataccccgcttttaccagtcggtaaaccgggtacaaacgattaccgtcctgtgcaagacctgcgcgaaagcaataaacgtgtgcaggatatccacccaaccgttccgaacccgtataatctgttgtgcgcgttaccgccgcagcgttcctggtacacggtgctggacctgaaggacgcgttcttctgtcttcgcctccatcccaccagccagccactgtttgcctttgaatggcgcgatcctgatacgggccgtactgggcaattaacatggacccgtttgccgcagggctttaagaacagtcccacgatctttgacgaggctcttcaccgcgacctcgcaaatttccgcatccaacacccacaggtaacgttactccagtatgtcgatgatcttttgttagcgggtgccaccaaacaggactgcttggaaggaacgaaagcacttctcttggaactcagtgatttaggttatcgtgtgtccgccaagaaagctcagatttgtcgccgcgaagtgacatacttaggctattcattgcgtgatggtcaacgttggcttactgaggcgcgcaagaagaccgtcgttcaaatccccgcccctaagactgaaaaacagatgcgtgaatttcttggcacggcaggtttctgccgtttgtggattcctggctttgctacgttagcggcacccctctatccactcacgaaagagaaaggagaattctcttgggccccagaacatcagaaagcgtttgacgccatcaagaaagcgttattaagcgctcctgctcttgcattgcccgatgtcaccaaaccattcacgctctacgtggatgaacgcaaaggcgtagcccgcggtgtgttgacacagaccttaggaccttggcgtcgtcccgtggcctacctctcgaagaaacttgacccagttgcaagtggttggcctgtctgcttgaaagctattgccgcagttgcaatcctcgtcaaagatgccgacaaacttactttgggccagaacctgactgttattgcaccacacgcccttgaaaacatcgttcgtcagccacctgatcgctggatgaccaatgctcgcatgacgcattatcagagcctcttgcttaccgaacgcgtgacttttgctccacctgcagccttaaaccccgcaacccttttacccgaagaaacagatgagcctgtgacgcatgactgtcatgaactcttgattgaagaaactggcgtacgcaaggacctcaccgatattccattaacaggtgaggtacttacgtggtttaccgaggggtcctcttatgtcgtcgaaggcaaacgtatggctggtgccgccgttgttgatggcacccgtactatctgggcaagcagcttacccgaaggcacgagtgctcagaaagcagagttgatggccttgacccaagccttacgccttgctgaagggaaatcgatcaatatttacaccgattcacgctatgcattcgccacggcacatgtacacggtgccatctacaaacaacgtggtttgttaacttctgctggccgcgagattaagaacaaagaagaaatcctttccttacttgaagccttacacctccccaaacgtctcgctattattcattgtccagggcatcagaaagcaaaagatcctatcagccgtgggaatcaaatggcagatcgtgtcgctaaacaggcagcccaaggcgttaacttgttgcccatgattgagacccctaaagctcca

SEQ ID NO: 468 - protein, 687 aa, synthetic construct
  REGION 1..687: note = Engineered reverse transcriptase variants
MHHHHHHGGSGVLTLQLDDEYRLYSPLVKPDQNIQFWLEQFPQAWAETGGMGLAKQVPPQVIQLKASATPVSVRQYPLSKEAQEGIRPHVQRLIQQGILVPVQSPWNTPLLPVGKPGTNDYRPVQDLRESNKRVQDIHPTVPNPYNLLCALPPQRSWYTVLDLKDAFFCLRLHPTSQPLFAFEWRDPDTGRTGQLTWTRLPQGFKNSPTIFDEALHRDLANFRIQHPQVTLLQYVDDLLLAGATKQDCLEGTKALLLELSDLGYRVSAKKAQICRREVTYLGYSLRDGQRWLTEARKKTVVQIPAPKTEKQMREFLGTAGFCRLWIPGFATLAAPLYPLTKEKGEFSWAPEHQKAFDAIKKALLSAPALALPDVTKPFTLYVDERKGVARGVLTQTLGPWRRPVAYLSKKLDPVASGWPVCLKAIAAVAILVKDADKLTLGQNLTVIAPHALENIVRQPPDRWMTNARMTHYQSLLLTERVTFAPPAALNPATLLPEETDEPVTHDCHELLIEETGVRKDLTDIPLTGEVLTWFTEGSSYVVEGKRMAGAAVVDGTRTIWASSLPEGTSAQKAELMALTQALRLAEGKSINIYTDSRYAFATAHVHGAIYKQRGLLTSAGREIKNKEEILSLLEALHLPKRLAIIHCPGHQKAKDPISRGNQMADRVAKQAAQGVNLLPMIETPKAP

SEQ ID NO: 469 - DNA, 2061 bp, synthetic construct
  misc_feature 1..2061: note = Engineered reverse transcriptase variants
  source 1..2061: mol_type = other DNA
atgcatcaccatcaccatcatggtggtagcggagtgctgacccttcagctggatgatgaatatcgcttgtacagtccgctggtcaaaccagaccaaaacattcagttctggctcgaacagtttccgcaagcgtgggctgaaactggtggcatgggcctggccaaacaggttcctcctcaggtaatccagttaaaggcatctgccacgccggtgtcagttcgtcagtatccgctgtcgaaagaagcgcaagaggggattcgcccacacgtgcagcgtttgatccagcagggcattctggtaccggttcaaagcccctggaataccccgcttttaccagtccgcaaaccgggtacaaacgattaccgtcctgtgcaagacctgcgcgaagtcaataaacgtgtgcaggatatccacccaaccgttccgaacccgtataatctgttgtgcgcgttaccgccgcagcgttcctggtacacggtgctggacctgaaggacgcgttcttctgtcttcgcctccatcccaccagccagccactgtttgcctttgaatggcgcgatcctgatacgggccgtactgggcaattaacatggaccctgttgccgcagggctttaagaacagtcccacgatctttgatgaggctcttcaccgcgacctcgcaaatttccgcatccaacacccacaggtaacgttactccagtatgtcgatgatcttttgttagcgggtgccaccaaacaggactgcttggaaggaacgaaagcacttctcttggaactcagtgatttaggttatcgtgtgtccgccaagaaagctcagatttgtcgccgcgaagtgacatacttaggctattcattgcgtgatggtcaacgttggcttactgaggcgcgcaagcgtaccgtcgttcaaatccccgcccctaagactaccaaacagatgcgtgaatttcttggcacggcaggtttctgccgtttgtggattcctggctttgctacgttagcggcacccctctatccactcacgaaagagaaaggagaattctcttgggccccagaacatcagaaagcgtttgacgccatcaagaaagcgttattaagcgctcctgctcttgcattgcccgatgtcaccaaaccattcacgctctacgtggatgaacgcaaaggcgtagcccgcggtgtgttgacacagaccttaggaccttggcgtcgtcccgtggcctacctctcgaagaaacttgacccagttgcaagtggttggcctgtctgcttgaaagctattgccgcagttgcaatcctcgtcaaagatgccgacaaacttactttgggccagaacctgactgttattgcaccacacgcccttgaaaacatcgttcgtcagccacctgatcgctggatgaccaatgctcgcatgacgcattatcagagcctcttgcttaccgaacgcgtgacttttgctccacctgcagccttaaaccccgcaacccttttacccgaagaaacagatgagcctgtgacgcatgactgtcatgaactcttgattgaagaaactggcgtacgcaaggacctcaccgatattccattaacaggtgaggtacttacgtggtttaccgaggggtcctcttatgtcgtcgaaggcaaacgtatggctggtgccgccgttgttgatggcacccgtactatctgggcaagcagcttacccgaaggcacgagtgctcagaaagcagagttgatggccttgacccaagccttacgccttgctgaagggaaatcgatcaatatttacaccgattcacgctatgcattcgccacggcacatgtacacggtgccatctacaaacaacgtggtttgttaacttctgctggccgcgagattaagaacaaagaagaaatcctttccttacttgaagccttacacctccccaaacgtctcgctattattcattgtccagggcatcagaaagcaaaagatcctatcagccgtgggaatcaaatggcagatcgtgtcgctaaacaggcagcccaaggcgttaacttgttgcccatgattgagacccctaaagctcca

SEQ ID NO: 470 - protein, 687 aa, synthetic construct
  REGION 1..687: note = Engineered reverse transcriptase variants
MHHHHHHGGSGVLTLQLDDEYRLYSPLVKPDQNIQFWLEQFPQAWAETGGMGLAKQVPPQVIQLKASATPVSVRQYPLSKEAQEGIRPHVQRLIQQGILVPVQSPWNTPLLPVRKPGTNDYRPVQDLREVNKRVQDIHPTVPNPYNLLCALPPQRSWYTVLDLKDAFFCLRLHPTSQPLFAFEWRDPDTGRTGQLTWTLLPQGFKNSPTIFDEALHRDLANFRIQHPQVTLLQYVDDLLLAGATKQDCLEGTKALLLELSDLGYRVSAKKAQICRREVTYLGYSLRDGQRWLTEARKRTVVQIPAPKTTKQMREFLGTAGFCRLWIPGFATLAAPLYPLTKEKGEFSWAPEHQKAFDAIKKALLSAPALALPDVTKPFTLYVDERKGVARGVLTQTLGPWRRPVAYLSKKLDPVASGWPVCLKAIAAVAILVKDADKLTLGQNLTVIAPHALENIVRQPPDRWMTNARMTHYQSLLLTERVTFAPPAALNPATLLPEETDEPVTHDCHELLIEETGVRKDLTDIPLTGEVLTWFTEGSSYVVEGKRMAGAAVVDGTRTIWASSLPEGTSAQKAELMALTQALRLAEGKSINIYTDSRYAFATAHVHGAIYKQRGLLTSAGREIKNKEEILSLLEALHLPKRLAIIHCPGHQKAKDPISRGNQMADRVAKQAAQGVNLLPMIETPKAP

SEQ ID NO: 471 - DNA, 2061 bp, synthetic construct
  misc_feature 1..2061: note = Engineered reverse transcriptase variants
  source 1..2061: mol_type = other DNA
atgcatcaccatcaccatcatggtggtagcggagtgctgacccttcagctggatgatgaatatcgcttgtacagtccgctggtcaaaccagaccaaaacattcagttctggctcgaacagtttccgcaagcgtgggctgaaactggtggcatgggcctggccaaacaggttcctcctcaggtaatccagttaaaggcatctgccacgccggtgtcagttcgtcagtatccgctgtcgaaagaagcgcaggaggggattcgcccacacgtgcagcgtttgatccagcagggcattctggtaccggttcaaagcccctggaataccccgcttttaccagtccgcaaaccgggtacaaacgattaccgtcctgtgcaagacctgcgcgaagtcaataaacgtgtgcaggatatccacccaaccgttccgaacccgtataatctgttgtgcgcgttaccgccgcagcgttcctggtacacggtgctggacctgaaggacgcgttcttctgtcttcgcctccatcccaccagccagccactgtttgcctttgaatggcgcgatcctgatacgggccgtactgggcaattaacatggaccctgttgccgcagggctttatgaacagtcccacgatctttgatgaggctcttcaccgcgacctcgcaaatttccgcatccaacacccacaggtaacgttactccagtatgtcgatgatcttttgttagcgggtgccaccaaacaggactgcttggaaggaacgaaagcacttctcttggaactcagtgatttaggttatcgtgtgtccgccaagaaagctcagatttgtcgccgcgaagtgacatacttaggctattcattgcgtgatggtcaacgttggcttactgaggcgcgcaagcgtaccgtcgttcaaatccccgcccctaagaccgcgaaacagatgcgtgaatttcttggcacggcaggtttctgccgtttgtggattcctggctttgctacgttagcggcacccctctatccactcacgaaagagaaaggagaattctcttgggccccagaacatcagaaagcgtttgacgccatcaagaaagcgttattaagcgctcctgctcttgcattgcccgatgtcaccaaaccattcacgctctacgtggatgaacgcaaaggcgtagcccgcggtgtgttgacacagaccttaggaccttggcgtcgtcccgtggcctacctctcgaagaaacttgacccagttgcaagtggttggcctgtctgcttgaaagctattgccgcagttgcaatcctcgtcaaagatgccgacaaacttactttgggccagaacattactgttattgcaccacacgcccttgaaaacatcgttcgtcagccacctgatcgctggatgaccaatgctcgcatgacgcattatcagagcctcttgcttaccgaacgcgtgacttttgctccacctgcagccttaaaccccgcaacccttttacccgaagaaacagatgagcctgtgacgcatgactgtcatgaactcttgattgaagaaactggcgtacgcaaggacctcaccgatattccattaacaggtgaggtacttacgtggtttaccgaggggtcctcttatgtcgtcgaaggcaaacgtatggctggtgccgccgttgttgatggcacccgtactatctgggcaagcagcttacccgaaggcacgagtgctcagaaagcagaattgatggccttgacccaagccttacgccttgctgaagggaaatcgatcaatatttacaccgattcacgctatgcattcgccacggcacatgtacacggtgccatctacaaacaacgtggtttgttaacttctgctggccgcgagattaagaacaaagaagaaatcctttccttacttgaagccttacacctccccaaacgtctcgctattattcattgtccagggcatcagaaagcaaaagatcctatcagccgtgggaatcaaatggcagatcgtgtcgctaaacaggcagcccaaggcgttaacttgttgcccatgattgagacccctaaagctcca

SEQ ID NO: 472 - protein, 687 aa, synthetic construct
  REGION 1..687: note = Engineered reverse transcriptase variants
MHHHHHHGGSGVLTLQLDDEYRLYSPLVKPDQNIQFWLEQFPQAWAETGGMGLAKQVPPQVIQLKASATPVSVRQYPLSKEAQEGIRPHVQRLIQQGILVPVQSPWNTPLLPVRKPGTNDYRPVQDLREVNKRVQDIHPTVPNPYNLLCALPPQRSWYTVLDLKDAFFCLRLHPTSQPLFAFEWRDPDTGRTGQLTWTLLPQGFMNSPTIFDEALHRDLANFRIQHPQVTLLQYVDDLLLAGATKQDCLEGTKALLLELSDLGYRVSAKKAQICRREVTYLGYSLRDGQRWLTEARKRTVVQIPAPKTAKQMREFLGTAGFCRLWIPGFATLAAPLYPLTKEKGEFSWAPEHQKAFDAIKKALLSAPALALPDVTKPFTLYVDERKGVARGVLTQTLGPWRRPVAYLSKKLDPVASGWPVCLKAIAAVAILVKDADKLTLGQNITVIAPHALENIVRQPPDRWMTNARMTHYQSLLLTERVTFAPPAALNPATLLPEETDEPVTHDCHELLIEETGVRKDLTDIPLTGEVLTWFTEGSSYVVEGKRMAGAAVVDGTRTIWASSLPEGTSAQKAELMALTQALRLAEGKSINIYTDSRYAFATAHVHGAIYKQRGLLTSAGREIKNKEEILSLLEALHLPKRLAIIHCPGHQKAKDPISRGNQMADRVAKQAAQGVNLLPMIETPKAP

SEQ ID NO: 473 - DNA, 2061 bp, synthetic construct
  misc_feature 1..2061: note = Engineered reverse transcriptase variants
  source 1..2061: mol_type = other DNA
atgcatcaccatcaccatcatggtggtagcggagtgctgacccttcagctggatgatgaatatcgcttgtacagtccgctggtcaaaccagaccaaaacattcagttctggctcgaacagtttccgcaagcgtgggctgaaactggtggcatgggcctggccaaacaggttcctcctcaggtaatccagttaaaggcatctgccacgccggtgtcagttcgtcagtatccgctgtcgaaagaagcgcaggaggggattcgcccacacgtgcagcgtttgatccagcagggcattctggtaccggttcaaagcccctggaataccccgcttttaccagtccgcaaaccgggtacaaacgattaccgtcctgtgcaagacctgcgcgaagtcaataaacgtgtgcaggatatccacccaaccgttccgaacccgtataatctgttgtgcgcgttaccgccgcagcgttcctggtacacggtgctggacctgaaggacgcgttcttctgtcttcgcctccatcccaccagccagccactgtttgcctttgaatggcgcgatcctgatacgggccgtactgggcaattaacatggacccgtttgccgcagggctttaagaacagtcccacgatctttgatgaggctcttcaccgcgacctcgcaaatttccgcatccaacacccacaggtaacgttactccagtatgtcgatgatcttttgttagcgggtgccaccaaacaggactgcttggaaggaacgaaagcacttctcttggaactcagtgatttaggttatcgtgtgtccgccaagaaagctcagatttgtcgccgcgaagtgacatacttaggctattcattgcgtgatggtcaacgttggcttactgaggcgcgcaagaagaccgtcgttcaaatccccgcccctaagaccgcgaaacagatgcgtgaatttcttggcacggcaggtttctgccgtttgtggattcctggctttgctacgttagcggcacccctctatccactcacgaaagagaaaggagaattctcttgggccccagaacatcagaaagcgtttgacgccatcaagaaagcgttattaagcgctcctgctcttgcattgcccgatgtcaccaaaccattcacgctctacgtggatgaacgcaaaggcgtagcccgcggtgtgttgacacagaccttaggaccttggcgtcgtcccgtggcctacctctcgaagaaacttgacccagttgcaagtggttggcctgtctgcttgaaagctattgccgcagttgcaatcctcgtcaaagatgccgacaaacttactttgggccagaacctgactgttattgcaccacacgcccttgaaaacatcgttcgtcagccacctgatcgctggatgaccaatgctcgcatgacgcattatcagagcctcttgcttaccgaacgcgtgacttttgctccacctgcagccttaaaccccgcaacccttttacccgaagaaacagatgagcctgtgacgcatgactgtcatgaactcttgattgaagaaactggcgtacgcaaggacctcaccgatattccattaacaggtgaggtacttacgtggtttaccgaggggtcctcttatgtcgtcgaaggcaaacgtatggctggtgccgccgttgttgatggcacccgtactatctgggcaagcagcttacccgaaggcacgagtgctcagaaagcagagttgatggccttgacccaagccttacgccttgctgaagggaaatcgatcaatatttacaccgattcacgctatgcattcgccacggcacatgtacacggtgccatctacaaacaacgtggtttgttaacttctgctggccgcgagattaagaacaaagaagaaatcctttccttacttgaagccttacacctccccaaacgtctcgctattattcattgtccagggcatcagaaagcaaaagatcctatcagccgtgggaatcaaatggcagatcgtgtcgctaaacaggcagcccaaggcgttaacttgttgcccatgattgagacccctaaagctcca

SEQ ID NO: 474 - protein, 687 aa, synthetic construct
  REGION 1..687: note = Engineered reverse transcriptase variants
MHHHHHHGGSGVLTLQLDDEYRLYSPLVKPDQNIQFWLEQFPQAWAETGGMGLAKQVPPQVIQLKASATPVSVRQYPLSKEAQEGIRPHVQRLIQQGILVPVQSPWNTPLLPVRKPGTNDYRPVQDLREVNKRVQDIHPTVPNPYNLLCALPPQRSWYTVLDLKDAFFCLRLHPTSQPLFAFEWRDPDTGRTGQLTWTRLPQGFKNSPTIFDEALHRDLANFRIQHPQVTLLQYVDDLLLAGATKQDCLEGTKALLLELSDLGYRVSAKKAQICRREVTYLGYSLRDGQRWLTEARKKTVVQIPAPKTAKQMREFLGTAGFCRLWIPGFATLAAPLYPLTKEKGEFSWAPEHQKAFDAIKKALLSAPALALPDVTKPFTLYVDERKGVARGVLTQTLGPWRRPVAYLSKKLDPVASGWPVCLKAIAAVAILVKDADKLTLGQNLTVIAPHALENIVRQPPDRWMTNARMTHYQSLLLTERVTFAPPAALNPATLLPEETDEPVTHDCHELLIEETGVRKDLTDIPLTGEVLTWFTEGSSYVVEGKRMAGAAVVDGTRTIWASSLPEGTSAQKAELMALTQALRLAEGKSINIYTDSRYAFATAHVHGAIYKQRGLLTSAGREIKNKEEILSLLEALHLPKRLAIIHCPGHQKAKDPISRGNQMADRVAKQAAQGVNLLPMIETPKAP

SEQ ID NO: 475 - DNA, 2061 bp, synthetic construct
  misc_feature 1..2061: note = Engineered reverse transcriptase variants
  source 1..2061: mol_type = other DNA
atgcatcaccatcaccatcatggtggtagcggagtgctgacccttcagctggatgatgaatatcgcttgtacagtccgctggtcaaaccagaccaaaacattcagttctggctcgaacagtttccgcaagcgtgggctgaaactggtggcatgggcctggccaaacaggttcctcctcaggtaatccagttaaaggcatctgccacgccggtgtcagttcgtcagtatccgctgtcgaaagaagcgcaagaggggattcgcccacacgtgcagcgtttgatccagcagggcattctggtaccggttcaaagcccctggaataccccgcttttaccagtccgtaaaccgggtacaaacgattaccgtcctgtgcaagacctgcgcgaagtcaataaacgtgtgcaggatatccacccaaccgttccgaacccgtataatctgttgtgcgcgttaccgccgcagcgttcctggtacacggtgctggacctgaaggacgcgttcttctgtcttcgcctccatcccaccagccagccactgtttgcctttgaatggcgcgatcctgatacgggccgtactgggcaattaacatggacccgtttgccgcagggctttaagaacagtcccacgatctttgatgaggctcttcaccgcgacctcgcaaatttccgcatccaacacccacaggtaacgttactccagtatgtcgatgatcttttgttagcgggtgccaccaaacaggactgcttggaaggaacgaaagcacttctcttggaactcagtgatttaggttatcgtgtgtccgccaagaaagctcagatttgtcgccgcgaagtgacatacttaggctattcattgcgtgatggtcaacgttggcttactgaggcgcgcaagaagaccgtcgttcaaatccccgcccctaagactgcaaaacagatgcgtgaatttcttggcacggcaggtttctgccgtttgtggattcctggctttgctacgttagcggcacccctctatccactcacgaaatggaaaggagaattctcttgggccccagaacatcagaaagcgtttgacgccatcaagaaagcgttattaagcgctcctgctcttgcattgcccgatgtcaccaaaccattcacgctctacgtggatgaacgcaaaggcgtagcccgcggtgtgttgacacagaccttaggaccttggcgtcgtcccgtggcctacctctcgaagaaacttgacccagttgcaagtggttggcctgtctgcttgaaagctattgccgcagttgcaatcctcgtcaaagatgccgacaaacttactttgggccagaacctgactgttattgcaccacacgcccttgaaaacatcgttcgtcagccacctgatcgctggatgaccaatgctcgcatgacgcattatcagagcctcttgcttaccgaacgcgtgacttttgctccacctgcagccttaaaccccgcaacccttttacccgaagaaacagatgagcctgtgacgcatgactgtcatgaactcttgattgaagaaactggcgtacgcaaggacctcaccgatattccattaacaggtgaggtacttacgtggtttaccgaggggtcctcttatgtcgtcgaaggcaaacgtatggctggtgccgccgttgttgatggcacccgtactatctgggcaagcagcttacccgaaggcacgagtgctcagaaagcagaattgatggccttgacccaagccttacgccttgctgaagggaaatcgatcaatatttacaccgattcacgctatgcattcgccacggcacatgtacacggtgccatctacaaacaacgtggtttgttaacttctgctggccgcgagattaagaacaaagaagaaatcctttccttacttgaagccttacacctccccaaacgtctcgctattattcattgtccagggcatcagaaagcaaaagatcctatcagccgtgggaatcaaatggcagatcgtgtcgctaaacaggcagcccaaggcgttaacttgttgcccatgattgagacccctaaagctcca

SEQ ID NO: 476 - protein, 687 aa, synthetic construct
  REGION 1..687: note = Engineered reverse transcriptase variants
MHHHHHHGGSGVLTLQLDDEYRLYSPLVKPDQNIQFWLEQFPQAWAETGGMGLAKQVPPQVIQLKASATPVSVRQYPLSKEAQEGIRPHVQRLIQQGILVPVQSPWNTPLLPVRKPGTNDYRPVQDLREVNKRVQDIHPTVPNPYNLLCALPPQRSWYTVLDLKDAFFCLRLHPTSQPLFAFEWRDPDTGRTGQLTWTRLPQGFKNSPTIFDEALHRDLANFRIQHPQVTLLQYVDDLLLAGATKQDCLEGTKALLLELSDLGYRVSAKKAQICRREVTYLGYSLRDGQRWLTEARKKTVVQIPAPKTAKQMREFLGTAGFCRLWIPGFATLAAPLYPLTKWKGEFSWAPEHQKAFDAIKKALLSAPALALPDVTKPFTLYVDERKGVARGVLTQTLGPWRRPVAYLSKKLDPVASGWPVCLKAIAAVAILVKDADKLTLGQNLTVIAPHALENIVRQPPDRWMTNARMTHYQSLLLTERVTFAPPAALNPATLLPEETDEPVTHDCHELLIEETGVRKDLTDIPLTGEVLTWFTEGSSYVVEGKRMAGAAVVDGTRTIWASSLPEGTSAQKAELMALTQALRLAEGKSINIYTDSRYAFATAHVHGAIYKQRGLLTSAGREIKNKEEILSLLEALHLPKRLAIIHCPGHQKAKDPISRGNQMADRVAKQAAQGVNLLPMIETPKAP

SEQ ID NO: 477 - DNA, 2061 bp, synthetic construct
  misc_feature 1..2061: note = Engineered reverse transcriptase variants
  source 1..2061: mol_type = other DNA
atgcatcaccatcaccatcatggtggtagcggagtgctgacccttcagctggatgatgaatatcgcttgtacagtccgctggtcaaaccagaccaaaacattcagttctggctcgaacagtttccgcaagcgtgggctgaaactggtggcatgggcctggccaaacaggttcctcctcaggtaatccagttaaaggcatctgccacgccggtgtcagttcgtcagtatccgctgtcgaaagaagcgcaagaggggattcgcccacacgtgcagcgtttgatccagcagggcattctggtaccggttcaaagcccctggaataccccgcttttaccagtccgcaaaccgggtacaaacgattaccgtcctgtgcaagacctgcgcgaagtcaataaacgtgtgcaggatatccacccaaccgttccgaacccgtataatctgttgtgcgcgttaccgccgcagcgttcctggtacacggtgctggacctgaaggacgcgttcttctgtcttcgcctccatcccaccagccagccactgtttgcctttgaatggcgcgatcctgatacgggccgtactgggcaattaacgtggacccgtttgccgcagggctttaagaacagtcccacgatctttgatgaggctcttcaccgcgacctcgcaaatttccgcatccaacacccacaggtaacgttactccagtatgtcgatgatcttttgttagcgggtgccaccaaacaggactgcttggaaggaacgaaagcacttctcttggaactcagtgatttaggttatcgtgtgtccgccaagaaagctcagatttgtcgccgcgaagtgacatacttaggctattcattgcgtgatggtcaacgttggcttactgaggcgcgcaagaagaccgtcgttcaaatccccgcccctaagaccgcgaaacagatgcgtgaatttcttggcacggcaggtttctgccgtttgtggattcctggcttcgctacgttagcggcacccctctatccactcacgaaagagaaaggagaattctcttgggccccagaacatcagaaagcgtttgacgccatcaagaaagcgttattaagcgctcctgctcttgcattgcccgatgtcaccaaaccattcacgctctacgtggatgaacgcaaaggcgtagcccgcggtgtgttgacacagaccttaggaccttggcgtcgtcccgtggcctacctctcgaagaaacttgacccagttgcaagtggttggcctgtctgcttgaaagctattgccgcagttgcaatcctcgtcaaagatgccgacaaacttactttgggccagaacctgactgttattgcaccacacgcccttgaaaacatcgttcgtcagccacctgatcgctggatgaccaatgctcgcatgacgcattatcagagcctcttgcttaccgaacgcgtgacttttgctccacctgcagccttaaaccccgcaacccttttacccgaagaaacagatgagcctgtgacgcatgactgtcatcagctcttgattgaagaaactggcgtacgcaaggacctcaccgatattccattaacaggtgaggtacttacgtggtttaccgaggggtcctcttatgtcgtcgaaggcaaacgtatggctggtgccgccgttgttgatggcacccgtactatctgggcaagcagcttacccgaaggcacgagtgctcagaaagcagagttgatggccttgacccaagccttacgccttgctgaagggaaatcgatcaatatttacaccgattcacgctatgcattcgccacggcacatgtacacggtgccatctacaaacaacgtggtttgttaacttctgctggccgcgagattaagaacaaagaagaaatcctttccttacttgaagccttacacctccccaaacgtctcgctattattcattgtccagggcatcagaaagcaaaagatcctatcagccgtgggaatcaaatggcagatcgtgtcgctaaacaggcagcccaaggcgttaacttgttgcccatgattgagacccctaaagctcca

SEQ ID NO: 478 - protein, 687 aa, synthetic construct
  REGION 1..687: note = Engineered reverse transcriptase variants
MHHHHHHGGSGVLTLQLDDEYRLYSPLVKPDQNIQFWLEQFPQAWAETGGMGLAKQVPPQVIQLKASATPVSVRQYPLSKEAQEGIRPHVQRLIQQGILVPVQSPWNTPLLPVRKPGTNDYRPVQDLREVNKRVQDIHPTVPNPYNLLCALPPQRSWYTVLDLKDAFFCLRLHPTSQPLFAFEWRDPDTGRTGQLTWTRLPQGFKNSPTIFDEALHRDLANFRIQHPQVTLLQYVDDLLLAGATKQDCLEGTKALLLELSDLGYRVSAKKAQICRREVTYLGYSLRDGQRWLTEARKKTVVQIPAPKTAKQMREFLGTAGFCRLWIPGFATLAAPLYPLTKEKGEFSWAPEHQKAFDAIKKALLSAPALALPDVTKPFTLYVDERKGVARGVLTQTLGPWRRPVAYLSKKLDPVASGWPVCLKAIAAVAILVKDADKLTLGQNLTVIAPHALENIVRQPPDRWMTNARMTHYQSLLLTERVTFAPPAALNPATLLPEETDEPVTHDCHQLLIEETGVRKDLTDIPLTGEVLTWFTEGSSYVVEGKRMAGAAVVDGTRTIWASSLPEGTSAQKAELMALTQALRLAEGKSINIYTDSRYAFATAHVHGAIYKQRGLLTSAGREIKNKEEILSLLEALHLPKRLAIIHCPGHQKAKDPISRGNQMADRVAKQAAQGVNLLPMIETPKAP

SEQ ID NO: 479 - DNA, 2061 bp, synthetic construct
  misc_feature 1..2061: note = Engineered reverse transcriptase variants
  source 1..2061: mol_type = other DNA
atgcatcaccatcaccatcatggtggtagcggagtgctgacccttcagctggatgatgaatatcgcttgtacagtccgctggtcaaaccagaccaaaacattcagttctggctcgaacagtttccgcaagcgtgggctgaaactggtggcatgggcctggccaaacaggttcctcctcaggtaatccagttaaaggcatctgccacgccggtgagtgttcgtcagtatccgctgtcgaaagaagcgcaagaggggattcgcccacacgtgcagcgtttgatccagcagggcattctggtaccggttcaaagcccctggaataccccgcttttaccagtccgcaaaccgggtacaaacgattaccgtcctgtgcaagacctgcgcgaagtcaataaacgtgtgcaggatatccacccaaccgttccgaacccgtataatctgttgtgcgcgttaccgccgcagcgttcctggtacacggtgctggacctgaaggacgcgttcttctgtcttcgcctccatcccaccagccagccactgtttgcctttgaatggcgcgatcctgatacgggccgtactgggcaattaacgtggacccgtttgccgcagggctttaagaacagtcccacgatctttgatgaggctcttcaccgcgacctcgcaaatttccgcatccaacacccacaggtaacgttactccagtatgtcgatgatcttttgttagcgggtgccaccaaacaggactgcttggaaggaacgaaagcacttctcttggaactcagtgatttaggttatcgtgtgtccgccaagaaagctcagatttgtcgccgcgaagtgacatacttaggctattcattgcgtgatggtcaacgttggcttactgaggcgcgcaagaagaccgtcgttcaaatccccgcccctaagaccgcgaaacaaatgcgtgaatttcttggcacggcaggtttctgccgtttgtggattcctggcttcgctacgttagcggcacccctctatccactcacgaaagaggccggagaattctcttgggccccagaacatcagaaagcgtttgacgccatcaagaaagcgttattaagcgctcctgctcttgcattgcccgatgtcaccaaaccattcacgctctacgtggatgaacgcaaaggcgtagcccgcggtgtgttgacacagaccttaggaccttggcgtcgtcccgtggcctacctctcgaagaaacttgacccagttgcaagtggttggcctgtctgcttgaaagctattgccgcagttgcaatcctcgtcaaagatgccgacaaacttactttgggccagaacattactgttattgcaccacacgcccttgaaaacatcgttcgtcagccacctgatcgctggatgaccaatgctcgcatgacgcattatcagagcctcttgcttaccgaacgcgtgacttttgctccacctgcagccttaaaccccgcaacccttttacccgaagaaacagatgagcctgtgacgcatgactgtcatgaactcttgattgaagaaactggcgtacgcaaggacctcaccgatattccattaacaggtgaggtacttacgtggtttaccgaggggtcctcttatgtcgtcgaaggcaaacgtatggctggtgccgccgttgttgatggcacccgtactatctgggcaagcagcttacccgaaggcacgagtgctcagaaagcagagttgatggccttgacccaagccttacgccttgctgaagggaaatcgatcaatatttacaccaattcacgctatgcattcgccacggcacatgtacacggtgccatctacaaacaacgtggtttgttaacttctgctggccgcgagattaagaacaaagaagaaatcctttccttacttgaagccttacacctccccaaacgtctcgctattattcattgtccagggcatcagaaagcaaaagatcctatcagccgtgggaatcaaatggcagatcgtgtcgctaaacaggcagcccaaggcgttaacttgttgcccatgattgagacccctaaagctcca

SEQ ID NO: 480 - protein, 687 aa, synthetic construct
  REGION 1..687: note = Engineered reverse transcriptase variants
MHHHHHHGGSGVLTLQLDDEYRLYSPLVKPDQNIQFWLEQFPQAWAETGGMGLAKQVPPQVIQLKASATPVSVRQYPLSKEAQEGIRPHVQRLIQQGILVPVQSPWNTPLLPVRKPGTNDYRPVQDLREVNKRVQDIHPTVPNPYNLLCALPPQRSWYTVLDLKDAFFCLRLHPTSQPLFAFEWRDPDTGRTGQLTWTRLPQGFKNSPTIFDEALHRDLANFRIQHPQVTLLQYVDDLLLAGATKQDCLEGTKALLLELSDLGYRVSAKKAQICRREVTYLGYSLRDGQRWLTEARKKTVVQIPAPKTAKQMREFLGTAGFCRLWIPGFATLAAPLYPLTKEAGEFSWAPEHQKAFDAIKKALLSAPALALPDVTKPFTLYVDERKGVARGVLTQTLGPWRRPVAYLSKKLDPVASGWPVCLKAIAAVAILVKDADKLTLGQNITVIAPHALENIVRQPPDRWMTNARMTHYQSLLLTERVTFAPPAALNPATLLPEETDEPVTHDCHELLIEETGVRKDLTDIPLTGEVLTWFTEGSSYVVEGKRMAGAAVVDGTRTIWASSLPEGTSAQKAELMALTQALRLAEGKSINIYTNSRYAFATAHVHGAIYKQRGLLTSAGREIKNKEEILSLLEALHLPKRLAIIHCPGHQKAKDPISRGNQMADRVAKQAAQGVNLLPMIETPKAP

SEQ ID NO: 481 - DNA, 2061 bp, synthetic construct
  misc_feature 1..2061: note = Engineered reverse transcriptase variants
  source 1..2061: mol_type = other DNA
atgcatcaccatcaccatcatggtggtagcggagtgctgacccttcagctggatgatgaatatcgcttgtacagtccgctggtcaaaccagaccaaaacattcagttctggctcgaacagtttccgcaagcgtgggctgaaactggtggcatgggcctggccaaacaggttcctcctcaggtaatccagttaaaggcatctgccacgccggtgtcagttatgcagtatccgctgtcgaaagaagcgcaggaggggattcgcccacacgtgcagcgtttgatccagcagggcattctggtaccggttcaaagcccctggaataccccgcttttaccagtccgcaaaccgggtacaaacgattaccgtcctgtgcaagacctgcgcgaagtcaataaacgtgtgcaggatatccacccaaccgttccgaacccgtataatctgttgtgcgcgttaccgccgcagcgttcctggtacacggtgctggacctgaaggacgcgttcttctgtcttcgcctccatcccaccagccagccactgtttgcctttgaatggcgcgatcctgatacgggccgtactgggcaattaacatggacccgtttgccgcagggctttaagaacagtcccacgatctttgatgaggctcttcaccgcgacctcgcaaatttccgcatccaacacccacaggtaacgttactccagtatgtcgatgatcttttgttagcgggtgccaccaaacaggactgcttggaaggaacgaaagcacttctcttggaactcagtgatttaggttatcgtgtgtccgccaagaaagctcagatttgtcgccgcgaagtgacatacttaggctattcattgcgtgatggtcaacgttggcttactgaggcgcgcaagcgtaccgtcgttcaaatccccgcccctaagaccgcgaaacaaatgcgtgagtttcttggcacggcaggtttctgccgtttgtggattcctggctttgctacgttagcggcacccctctatccactcacgaaagagaaaggagaattctcttgggccccagaacatcagaaagcgtttgacgccatcaagaaagcgttattaagcgctcctgctcttgcattgcccgatgtcaccaaaccattcacgctctacgtggatgaacgcaaaggcgtagcccgcggtgtgttgacacagaccttaggaccttggcgtcgtcccgtggcctacctctcgaagaaacttgacccagttgcaagtggttggcctgtctgcttgaaagctattgccgcagttgcaatcctcgtcaaagatgccgacaaacttactttgggccagaacctgactgttattgcaccacacgcccttgaaaacatcgttcgtcagccacctgatcgctggatgaccaatgctcgcatgacgcattatcagagcctcttgcttaccgaacgcgtgacttttgctccacctgcagccttaaaccccgcaacccttttacccgaagaaacagatgagcctgtgacgcatgactgtcatgaactcttgattgaagaaactggcgtacgcaaggacctcaccgatattccattaacaggtgaggtacttacgtggtttaccgaggggtcctcttatgtcgtcgaaggcaaacgtatggctggtgccgccgttgttgatggcacccgtactatctgggcaagcagcttacccgaaggcacgagtgctcagaaagcagagttgatggccttgacccaagccttacgccttgctgaagggaaatcgatcaatatttacaccgattcacgctatgcattcgccacggcacatgtacacggtgccatctacaaacaacgtggtttgttaacttctgctggccgcgagattaagaacaaagaagaaatcctttccttacttgaagccttacacctccccaaacgtctcgctattattcattgtccagggcatcagaaagcaaaagatcctatcagccgtgggaatcaaatggcagatcgtgtcgctaaacaggcagcccaaggcgttaacttgttgcccatgattgagacccctaaagctcca

SEQ ID NO: 482 - protein, 687 aa, synthetic construct
  REGION 1..687: note = Engineered reverse transcriptase variants
MHHHHHHGGSGVLTLQLDDEYRLYSPLVKPDQNIQFWLEQFPQAWAETGGMGLAKQVPPQVIQLKASATPVSVMQYPLSKEAQEGIRPHVQRLIQQGILVPVQSPWNTPLLPVRKPGTNDYRPVQDLREVNKRVQDIHPTVPNPYNLLCALPPQRSWYTVLDLKDAFFCLRLHPTSQPLFAFEWRDPDTGRTGQLTWTRLPQGFKNSPTIFDEALHRDLANFRIQHPQVTLLQYVDDLLLAGATKQDCLEGTKALLLELSDLGYRVSAKKAQICRREVTYLGYSLRDGQRWLTEARKRTVVQIPAPKTAKQMREFLGTAGFCRLWIPGFATLAAPLYPLTKEKGEFSWAPEHQKAFDAIKKALLSAPALALPDVTKPFTLYVDERKGVARGVLTQTLGPWRRPVAYLSKKLDPVASGWPVCLKAIAAVAILVKDADKLTLGQNLTVIAPHALENIVRQPPDRWMTNARMTHYQSLLLTERVTFAPPAALNPATLLPEETDEPVTHDCHELLIEETGVRKDLTDIPLTGEVLTWFTEGSSYVVEGKRMAGAAVVDGTRTIWASSLPEGTSAQKAELMALTQALRLAEGKSINIYTDSRYAFATAHVHGAIYKQRGLLTSAGREIKNKEEILSLLEALHLPKRLAIIHCPGHQKAKDPISRGNQMADRVAKQAAQGVNLLPMIETPKAP

SEQ ID NO: 483 - DNA, 2061 bp, synthetic construct
  misc_feature 1..2061: note = Engineered reverse transcriptase variants
  source 1..2061: mol_type = other DNA
atgcatcaccatcaccatcatggtggtagcggagtgctgacccttcagctggatgatgaatatcgcttgtacagtccgctggtcaaaccagaccaaaacattcagttctggctcgaacagtttccgcaagcgtgggctgaaactggtggcatgggcctggccaaacaggttcctcctcaggtaatccagttaaaggcatctgccacgccggtgtcagttatgcagtatccgctgtcgaaagaagcgcaggaggggattcgcccacacgtgcagcgtttgatccagcagggcattctggtaccggttcaaagcccctggaataccccgcttttaccagtccgcaaaccgggtacaaacgattaccgtcctgtgcaagacctgcgcctggtcaataaacgtgtgcaggatatccacccaaccgttccgaacccgtataatctgttgtgcgcgttaccgccgcagcgttcctggtacacggtgctggacctgaaggacgcgttcttctgtcttcgcctccatcccaccagccagccactgtttgcctttgaatggcgcgatcctgatacgggccgtactgggcaattaacgtggacccgtttgccgcagggctttaagaacagtcccacgatctttgacgaggctcttcaccgcgacctcgcaaatttccgcatccaacacccacaggtaacgttactccagtatgtcgatgatcttttgttagcgggtgccaccaaacaggactgcttggaaggaacgaaagcacttctcttggaactcagtgatttaggttatcgtgtgtccgccaagaaagctcagatttgtcgccgcgaagtgacatacttaggctattcattgcgtgatggtcaacgttggcttactgaggcgcgcaagaaaaccgtcgttcaaatccccgcccctaagaccgcgaaacagatgcgtgaatttcttggcacggcaggtttctgccgtttgtggattcctggctttgctacgttagcggcacccctctatccactcacgaaagagaagggagaattctcttgggccccagaacatcagaaagcgtttgacgccatcaagaaagcgttattaagcgctcctgctcttgcattgcccgatgtcaccaaaccattcacgctctacgtggatgaacgcaaaggcgtagcccgcggtgtgttgacacagaccttaggaccttggcgtcgtcccgtggcctacctctcgaagaaacttgacccagttgcaagtggttggcctgtctgcttgaaagctattgccgcagttgcaatcctcgtcaaagatgccgacaaacttactttgggccagaacatcactgttattgcaccacacgcccttgaaaacatcgttcgtcagccacctgatcgctggatgaccaatgctcgcatgacgcattatcagagcctcttgcttaccgaacgcgtgacttttgctccacctgcagccttaaaccccgcaacccttttacccgaagaaacagatgagcctgtgacgcatgactgtcatgaactcttgattgaagaaactggcgtacgcaaggacctcaccgatattccattaacaggtgaggtacttacgtggtttaccgaggggtcctcttatgtcgtcgaaggcaaacgtatggctggtgccgccgttgttgatggcacccgtactatctgggcaagcagcttacccgaaggcacgagtgctcagaaagcagagttgatggccttgacccaagccttacgccttgctgaagggaaatcgatcaatatttacaccgattcacgctatgcattcgccacggcacatgtacacggtgccatctacaaacaacgtggtttgttaacttctgctggccgcgagattaagaacaaagaagaaatcctttccttacttgaagccttacacctccccaaacgtctcgctattattcattgtccagggcatcagaaagcaaaagatcctatcagccgtgggaatcaaatggcagatcgtgtcgctaaacaggcagcccaaggcgttaacttgttgcccatgattgagacccctaaagctcca

SEQ ID NO: 484 - protein, 687 aa, synthetic construct
  REGION 1..687: note = Engineered reverse transcriptase variants
MHHHHHHGGSGVLTLQLDDEYRLYSPLVKPDQNIQFWLEQFPQAWAETGGMGLAKQVPPQVIQLKASATPVSVMQYPLSKEAQEGIRPHVQRLIQQGILVPVQSPWNTPLLPVRKPGTNDYRPVQDLRLVNKRVQDIHPTVPNPYNLLCALPPQRSWYTVLDLKDAFFCLRLHPTSQPLFAFEWRDPDTGRTGQLTWTRLPQGFKNSPTIFDEALHRDLANFRIQHPQVTLLQYVDDLLLAGATKQDCLEGTKALLLELSDLGYRVSAKKAQICRREVTYLGYSLRDGQRWLTEARKKTVVQIPAPKTAKQMREFLGTAGFCRLWIPGFATLAAPLYPLTKEKGEFSWAPEHQKAFDAIKKALLSAPALALPDVTKPFTLYVDERKGVARGVLTQTLGPWRRPVAYLSKKLDPVASGWPVCLKAIAAVAILVKDADKLTLGQNITVIAPHALENIVRQPPDRWMTNARMTHYQSLLLTERVTFAPPAALNPATLLPEETDEPVTHDCHELLIEETGVRKDLTDIPLTGEVLTWFTEGSSYVVEGKRMAGAAVVDGTRTIWASSLPEGTSAQKAELMALTQALRLAEGKSINIYTDSRYAFATAHVHGAIYKQRGLLTSAGREIKNKEEILSLLEALHLPKRLAIIHCPGHQKAKDPISRGNQMADRVAKQAAQGVNLLPMIETPKAP

SEQ ID NO: 485 - DNA, 2061 bp, synthetic construct
  misc_feature 1..2061: note = Engineered reverse transcriptase variants
  source 1..2061: mol_type = other DNA
atgcatcaccatcaccatcatggtggtagcggagtgctgacccttcagctggatgatgaatatcgcttgtacagtccgctggtcaaaccagaccaaaacattcagttctggctcgaacagtttccgcaagcgtgggctgaaactggtggcatgggcctggccaaacaggttcctcctcaggtaatccagttaaaggcatctgccacgccggtgtcagttatgcagtatccgctgtcgaaagaagcggaggaggggattcgcccacacgtgcagcgtttgatccagcagggcattctggtaccggttcaaagcccctggaataccccgcttttaccagtccgcaaaccgggtacaaacgattaccgtcctgtgcaagacctgcgcctggtcaattttcgtgtgcaggatatccacccaaccgttccgaacccgtataatctgttgtgcgcgttaccgccgcagcgttcctggtacacggtgctggacctgaaggacgcgttcttctgtcttcgcctccatcccaccagccagccactgtttgcctttgaatggcgcgatcctgatacgggccgtactgggcaattaacatggacccgtttgccgcagggctttaagaacagtcccacgatctttgtcgaggctcttcaccgcgacctcgcaaatttccgcatccaacacccacaggtaacgttactccagtatgtcgatgatcttttgttagcgggtgccaccaaacaggactgcttggaaggaacgaaagcacttctcttggaactcagtgatttaggttatcgtgtgtccgccaagaaagctcagatttgtcgccgcgaagtgacatacttaggctattcattgcgtgatggtcaacgttggcttactgaggcgcgcaagcgtaccgtcgttcaaatccccgcccctaagaccgcgaaacaaatgcgtgagtttcttggcacggcaggtttctgccgtttgtggattcctggctttgctacgttagcggcacccctctatccactcacgaaagagaaaggagaattctcttgggccccagaacatcagaaagcgtttgacgccatcaagaaagcgttattaagcgctcctgctcttgcattgcccgatgtcaccaaaccattcacgctctacgtggatgaacgcaaaggcgtagcccgcggtgtgttgacacagaccttaggaccttggcgtcgtcccgtggcctacctctcgaagaaacttgacccagttgcaagtggttggcctgtctgcttgaaagctattgccgcagttgcaatcctcgtcaaagatgccgacaaacttactttgggccagaacctgactgttattgcaccacacgcccttgaaaacatcgttcgtcagccacctgatcgctggatgaccaatgctcgcatgacgcattatcagagcctcttgcttaccgaacgcgtgacttttgctccacctgcagccttaaaccccgcaacccttttacccgaagaaacagatgagcctgtgacgcatgactgtcatcagctcttgattgaagaaactggcgtacgcaaggacctcaccgatattccattaacaggtgaggtacttacgtggtttaccgaggggtcctcttatgtcgtcgaaggcaaacgtatggctggtgccgccgttgttgatggcacccgtactatctgggcaagcagcttacccgaaggcacgagtgctcagaaagcagagttgatggccttgacccaagccttacgccttgctgaagggaaatcgatcaatatttacaccgattcacgctatgcattcgccacggcacatgtacacggtgccatctacaaacaacgtggtttgttaacttctgctggccgcgagattaagaacaaagaagaaatcctttccttacttgaagccttacacctccccaaacgtctcgctattattcattgtccagggcatcagaaagcaaaagatcctatcagccgtgggaatcaaatggcagatcgtgtcgctaaacaggcagcccaaggcgttaacttgttgcccatgattgagacccctaaagctcca

SEQ ID NO: 486 - protein, 687 aa, synthetic construct
  REGION 1..687: note = Engineered reverse transcriptase variants
MHHHHHHGGSGVLTLQLDDEYRLYSPLVKPDQNIQFWLEQFPQAWAETGGMGLAKQVPPQVIQLKASATPVSVMQYPLSKEAEEGIRPHVQRLIQQGILVPVQSPWNTPLLPVRKPGTNDYRPVQDLRLVNFRVQDIHPTVPNPYNLLCALPPQRSWYTVLDLKDAFFCLRLHPTSQPLFAFEWRDPDTGRTGQLTWTRLPQGFKNSPTIFVEALHRDLANFRIQHPQVTLLQYVDDLLLAGATKQDCLEGTKALLLELSDLGYRVSAKKAQICRREVTYLGYSLRDGQRWLTEARKRTVVQIPAPKTAKQMREFLGTAGFCRLWIPGFATLAAPLYPLTKEKGEFSWAPEHQKAFDAIKKALLSAPALALPDVTKPFTLYVDERKGVARGVLTQTLGPWRRPVAYLSKKLDPVASGWPVCLKAIAAVAILVKDADKLTLGQNLTVIAPHALENIVRQPPDRWMTNARMTHYQSLLLTERVTFAPPAALNPATLLPEETDEPVTHDCHQLLIEETGVRKDLTDIPLTGEVLTWFTEGSSYVVEGKRMAGAAVVDGTRTIWASSLPEGTSAQKAELMALTQALRLAEGKSINIYTDSRYAFATAHVHGAIYKQRGLLTSAGREIKNKEEILSLLEALHLPKRLAIIHCPGHQKAKDPISRGNQMADRVAKQAAQGVNLLPMIETPKAP

SEQ ID NO: 487 - DNA, 2061 bp, synthetic construct
  misc_feature 1..2061: note = Engineered reverse transcriptase variants
  source 1..2061: mol_type = other DNA
atgcatcaccatcaccatcatggtggtagcggagtgctgacccttcagctggatgatgaatatcgcttgtacagtccgctggtcaaaccagaccaaaacattcagttctggctcgaacagtttccgcaagcgtgggctgaaactggtggcatgggcctggccaaacaggttcctcctcaggtaatccagttaaaggcatctgccacgccggtgagtgttcctcagtatccgctgtcgaaagaagcggcagaggggattcgcccacacgtgcagactttgatccagcagggcattctggtaccggttcaaagcccctggaataccccgcttttaccagtccgcaaaccgggtacaaacgattaccgtcctgtgcaagacctgcgcgaagtcaataaacgtgttcaggatatccacccaaccgttccgaacccgtataatctgttgtgcgcgttaccgccgcagcgttcctggtacacggtgctggacctgaaggacgcgttcttctgtcttcgcctccatcccaccagccagccactgtttgcctttgaatggcgcgatcctgatacgggccgtactgggcaattaacgtggacccgtttgccgcagggctttaagaacagtcccacgatctttgatgaggctcttcaccgcgacctcgcaaatttccgcatccaacacccacaggtaacgttactccagtatgtcgatgatcttttgttagcgggtgccaccaaacaggactgcttggaaggaacgaaagcacttctcttggaactcagtgatttaggttatcgtgtgtccgccaagaaagctcagatttgtcgccgcgaagtgacatacttaggctattcattgcgtgatggtcaacgttggcttactgaggcgcgcaagaagaccgtcgttcaaatccccgcccctaagaccgcgaaacagatgcgtgaatttcttggcacggcaggtttctgccgtttgtggattcctggcttcgctacgttagcggcacccctctatccactcacgaaagaggccggagaattctcttgggccccagaacatcagaaagcgtttgacgccatcaagaaagcgttattaagcgctcctgctcttgcattgcccgatgtcaccaaaccattcacgctctacgtggatgaacgcaaaggcgtagcccgcggtgtgttgacacagaccttaggaccttggcgtcgtcccgtggcctacctctcgaagaaacttgacccagttgcaagtggttggcctgtctgcttgaaagctattgccgcagttgcaatcctcgtcaaagatgccgacaaacttactttgggccagaacctgactgttattgcaccacacgcccttgaaaacatcgttcgtcagccacctgatcgctggatgaccaatgctcgcatgacgcattatcagagcctcttgcttaccgaacgcgtgacttttgctccacctgcagccttaaaccccgcaacccttttacccgaagaaacagatgagcctgtgacgcatgactgtcatcagctcttgattgaagaaactggcgtacgcaaggacctcaccgatattccattaacaggtgaggtacttacgtggtttaccgaggggtcctcttatgtcgtcgaaggcaaacgtatggctggtgccgccgttgttgatggcacccgtactatctgggcaagcagcttacccgaaggcacgagtgctcagaaagcagagttgatggccttgacccaagccttacgccttgctgaagggaaatcgatcaatatttacaccgattcacgctatgcattcgccacggcacatgtacacggtgccatctacaaacaacgtggtttgttaacttctgctggccgcgagattaagaacaaagaagaaatcctttccttacttgaagccttacacctccccaaacgtctcgctattattcattgtccagggcatcagaaagcaaaagatcctatcagccgtgggaatcaaatggcagatcgtgtcgctaaacaggcagcccaaggcgttaacttgttgcccatgattgagacccctaaagctcca

SEQ ID NO: 488 - protein, 687 aa, synthetic construct
  REGION 1..687: note = Engineered reverse transcriptase variants
MHHHHHHGGSGVLTLQLDDEYRLYSPLVKPDQNIQFWLEQFPQAWAETGGMGLAKQVPPQVIQLKASATPVSVPQYPLSKEAAEGIRPHVQTLIQQGILVPVQSPWNTPLLPVRKPGTNDYRPVQDLREVNKRVQDIHPTVPNPYNLLCALPPQRSWYTVLDLKDAFFCLRLHPTSQPLFAFEWRDPDTGRTGQLTWTRLPQGFKNSPTIFDEALHRDLANFRIQHPQVTLLQYVDDLLLAGATKQDCLEGTKALLLELSDLGYRVSAKKAQICRREVTYLGYSLRDGQRWLTEARKKTVVQIPAPKTAKQMREFLGTAGFCRLWIPGFATLAAPLYPLTKEAGEFSWAPEHQKAFDAIKKALLSAPALALPDVTKPFTLYVDERKGVARGVLTQTLGPWRRPVAYLSKKLDPVASGWPVCLKAIAAVAILVKDADKLTLGQNLTVIAPHALENIVRQPPDRWMTNARMTHYQSLLLTERVTFAPPAALNPATLLPEETDEPVTHDCHQLLIEETGVRKDLTDIPLTGEVLTWFTEGSSYVVEGKRMAGAAVVDGTRTIWASSLPEGTSAQKAELMALTQALRLAEGKSINIYTDSRYAFATAHVHGAIYKQRGLLTSAGREIKNKEEILSLLEALHLPKRLAIIHCPGHQKAKDPISRGNQMADRVAKQAAQGVNLLPMIETPKAP

SEQ ID NO: 489 - DNA, 2061 bp, synthetic construct
  misc_feature 1..2061: note = Engineered reverse transcriptase variants
  source 1..2061: mol_type = other DNA
atgcatcaccatcaccatcatggtggtagcggagtgctgacccttcagctggatgatgaatatcgcttgtacagtccgctggtcaaaccagaccaaaacattcagttctggctcgaacagtttccgcaagcgtgggctgaaactggtggcatgggcctggccaaacaggttcctcctcaggtaatccagttaaaggcatctgccacgccggtgagtgttcctcagtatccgctgtcgaaagaagcggcagaggggattcgcccacacgtgcagcgtttgatccagcagggcattctggtaccggttcaaagcccctggaataccccgcttttaccagtccgcaaaccgggtacaaacgattaccgtcctgtgcaagacctgcgcgaagtcaataaacgtccacaggatatccacccaaccgttccgaacccgtataatctgttgtgcgcgttaccgccgcagcgttcctggtacacggtgctggacctgaaggacgcgttcttctgtcttcgcctccatcccaccagccagccactgtttgcctttgaatggcgcgatcctgatacgggccgtactgggcaattaacgtggacccgtttgccgcagggctttaagaacagtcccacgatctttgatgaggctcttcaccgcgacctcgcaaatttccgcatccaacacccacaggtaacgttactccagtatgtcgatgatcttttgttagcgggtgccaccaaacaggactgcttggaaggaacgaaagcacttctcttggaactcagtgatttaggttatcgtgtgtccgccaagaaagctcagatttgtcgccgcgaagtgacatacttaggctattcattgcgtgatggtcaacgttggcttactcaggcgcgcaagaagaccgtcgttcaaatccccgcccctaagaccgcgaaacagatgcgtgaatttcttggcacggcaggtttctgccgtttgtggattcctggctttgctacgttagcggcacccctctatccactcacgaaagagaaaggagaattctcttgggccccagaacatcagaaagcgtttgacgccatcaagaaagcgttattaagcgctcctgctcttgcattgcccgatgtcaccaaaccattcacgctctacgtggatgaacgcaaaggcgtagcccgcggtgtgttgacacagaccttaggaccttggcgtcgtcccgtggcctacctctcgaagaaacttgacccagttgcaagtggttggcctgtctgcttgaaagctattgccgcagttgcaatcctcgtcaaagatgccgacaaacttactttgggccagaacctgactgttattgcaccacacgcccttgaaaacatcgttcgtcagccacctgatcgctggatgaccaatgctcgcatgacgcattatcagagcctcttgcttaccgaacgcgtgacttttgctccacctgcagccttaaaccccgcaacccttttacccgaagaaacagatgagcctgtgacgcatgactgtcatgagctcttgattgaagaaactggcgtacgcaaggacctcaccgatattccattaacaggtgaggtacttacgtggtttaccgaggggtcctcttatgtcgtcgaaggcaaacgtatggctggtgccgccgttgttgatggcacccgtactatctgggcaagcagcttacccgaaggcacgagtgctcagaaagcacaattgatggccttgacccaagccttacgccttgctgaagggaaatcgatcaatatttacaccgattcacgctatgcattcgccacggcacatgtacacggtgccatctacaaacaacgtggtttgttaacttctgctggccgcgagattaagaacaaagaagaaatcctttccttacttgaagccttacacctccccaaacgtctcgctattattcattgtccagggcatcagaaagcaaaagatcctatcagccgtgggaatcaaatggcagatcgtgtcgctaaacaggcagcccaaggcgttaacttgttgcccatgattgagacccctaaagctcca

SEQ ID NO: 490 - protein, 687 aa, synthetic construct
  REGION 1..687: note = Engineered reverse transcriptase variants
MHHHHHHGGSGVLTLQLDDEYRLYSPLVKPDQNIQFWLEQFPQAWAETGGMGLAKQVPPQVIQLKASATPVSVPQYPLSKEAAEGIRPHVQRLIQQGILVPVQSPWNTPLLPVRKPGTNDYRPVQDLREVNKRPQDIHPTVPNPYNLLCALPPQRSWYTVLDLKDAFFCLRLHPTSQPLFAFEWRDPDTGRTGQLTWTRLPQGFKNSPTIFDEALHRDLANFRIQHPQVTLLQYVDDLLLAGATKQDCLEGTKALLLELSDLGYRVSAKKAQICRREVTYLGYSLRDGQRWLTQARKKTVVQIPAPKTAKQMREFLGTAGFCRLWIPGFATLAAPLYPLTKEKGEFSWAPEHQKAFDAIKKALLSAPALALPDVTKPFTLYVDERKGVARGVLTQTLGPWRRPVAYLSKKLDPVASGWPVCLKAIAAVAILVKDADKLTLGQNLTVIAPHALENIVRQPPDRWMTNARMTHYQSLLLTERVTFAPPAALNPATLLPEETDEPVTHDCHELLIEETGVRKDLTDIPLTGEVLTWFTEGSSYVVEGKRMAGAAVVDGTRTIWASSLPEGTSAQKAQLMALTQALRLAEGKSINIYTDSRYAFATAHVHGAIYKQRGLLTSAGREIKNKEEILSLLEALHLPKRLAIIHCPGHQKAKDPISRGNQMADRVAKQAAQGVNLLPMIETPKAP

SEQ ID NO: 491 - DNA, 2061 bp, synthetic construct
  misc_feature 1..2061: note = Engineered reverse transcriptase variants
  source 1..2061: mol_type = other DNA
atgcatcaccatcaccatcatggtggtagcggagtgctgacccttcagctggatgatgaatatcgcttgtacagtccgctggtcaaaccagaccaaaacattcagttctggctcgaacagtttccgcaagcgtgggctgaaactggtggcatgggcctggccaaacaggttcctcctcaggtaatccagttaaaggcatctgccacgccggtgagtgttcctcagtatccgctgtcgaaagaagcgtgggaggggattcgcccacacgtgcagcgtttgatccagcagggcattctggtaccggttcaaagcccctggaataccccgcttttaccagtccgcaaaccgggtacaaacgattaccgtcctgtgcaagacctgcgcgaagtcaataaacgtgttcaggatatccacccaaccgttccgaacccgtataatctgttgtgcgcgttaccgccgcagcgttcctggtacacggtgctggacctgaaggacgcgttcttctgtcttcgcctccatcccaccagccagccactgtttgcctttgaatggcgcgatcctgatacgggccgtactgggcaattaacgtggacccgtttgccgcagggctttaagaacagtcccacgatctttgatgaggctcttcaccgcgacctcgcaaatttccgcatccaacacccacaggtaacgttactccagtatgtcgatgatcttttgttagcgggtgccaccaaacaggactgcttggaaggaacgaaagcacttctcttggaactcagtgatttaggttatcgtgtgtccgccaagaaagctcagatttgtcgccgcgaagtgacatacttaggctattcattgcgtgatggtcaacgttggcttactgaggcgcgcaagcgtaccgtcgttcaaatccccgcccctaagaccgcgaaacagatgcgtgaatttcttggcacggcaggtttctgccgtttgtggattcctggctttgctacgttagcggcacccctctatccactcacgaaagagaaaggagaattctcttgggccccagaacatcagaaagcgtttgacgccatcaagaaagcgttattaagcgctcctgctcttgcattgcccgatgtcaccaaaccattcacgctctacgtggatgaacgcaaaggcgtagcccgcggtgtgttgacacagaccttaggaccttggcgtcgtcccgtggcctacctctcgaagaaacttgacccagttgcaagtggttggcctgtctgcttgaaagctattgccgcagttgcaatcctcgtcaaagatgccgacaaacttactttgggccagaacattactgttattgcaccacacgcccttgaaaacatcgttcgtcagccacctgatcgctggatgaccaatgctcgcatgacgcattatcagagcctcttgcttaccgaacgcgtgacttttgctccacctgcagccttaaaccccgcaacccttttacccgaagaaacagatgagcctgtgacgcatgactgtcatcagctcttgattgaagaaactggcgtacgcaaggacctcaccgatattccattaacaggtgaggtacttacgtggtttaccgaggggtcctcttatgtcgtcgaaggcaaacgtatggctggtgccgccgttgttgatggcacccgtactatctgggcaagcagcttacccgaaggcacgagtgctcagaaagcagaattgatggccttgacccaagccttacgccttgctgaagggaaatcgatcaatatttacaccgattcacgctatgcattcgccacggcacatgtacacggtgccatctacaaacaacgtggtttgttaacttctgctggccgcgagattaagaacaaagaagaaatcctttccttacttgaagccttacacctccccaaacgtctcgctattattcattgtccagggcatcagaaagcaaaagatcctatcagccgtgggaatcaaatggcagatcgtgtcgctaaacaggcagcccaaggcgttaacttgttgcccatgattgagacccctaaagctcca

SEQ ID NO: 492 - protein, 687 aa, synthetic construct
  REGION 1..687: note = Engineered reverse transcriptase variants
MHHHHHHGGSGVLTLQLDDEYRLYSPLVKPDQNIQFWLEQFPQAWAETGGMGLAKQVPPQVIQLKASATPVSVPQYPLSKEAWEGIRPHVQRLIQQGILVPVQSPWNTPLLPVRKPGTNDYRPVQDLREVNKRVQDIHPTVPNPYNLLCALPPQRSWYTVLDLKDAFFCLRLHPTSQPLFAFEWRDPDTGRTGQLTWTRLPQGFKNSPTIFDEALHRDLANFRIQHPQVTLLQYVDDLLLAGATKQDCLEGTKALLLELSDLGYRVSAKKAQICRREVTYLGYSLRDGQRWLTEARKRTVVQIPAPKTAKQMREFLGTAGFCRLWIPGFATLAAPLYPLTKEKGEFSWAPEHQKAFDAIKKALLSAPALALPDVTKPFTLYVDERKGVARGVLTQTLGPWRRPVAYLSKKLDPVASGWPVCLKAIAAVAILVKDADKLTLGQNITVIAPHALENIVRQPPDRWMTNARMTHYQSLLLTERVTFAPPAALNPATLLPEETDEPVTHDCHQLLIEETGVRKDLTDIPLTGEVLTWFTEGSSYVVEGKRMAGAAVVDGTRTIWASSLPEGTSAQKAELMALTQALRLAEGKSINIYTDSRYAFATAHVHGAIYKQRGLLTSAGREIKNKEEILSLLEALHLPKRLAIIHCPGHQKAKDPISRGNQMADRVAKQAAQGVNLLPMIETPKAP

SEQ ID NO: 493 - DNA, 2061 bp, synthetic construct
  misc_feature 1..2061: note = Engineered reverse transcriptase variants
  source 1..2061: mol_type = other DNA
atgcatcaccatcaccatcatggtggtagcggagtgctgacccttcagctggatgatgaatatcgcttgtacagtccgctggtcaaaccagaccaaaacattcagttctggctcgaacagtttccgcaagcgtgggctgaaactggtggcatgggcctggccaaacaggttcctcctcaggtaatccagttaaaggcatctgccacgccggtgagtgttcctcagtatccgctgtcgaaagaagcgcaagaggggattcgcccacacgtgcagcgtttgatccagcagggcattctggtaccggttcaaagcccctggaataccccgcttttaccagtccgcaaaccgggtacaaacgattaccgtcctgtgcaagacctgcgcgaagtcaataaacgtgtgcaggatatccacccaaccgttccgaacccgtataatctgttgtgcgcgttaccgccgcagcgttcctggtacacggtgctggacctgaaggacgcgttcttctgtcttcgcctccatcccaccagccagccactgtttgcctttgaatggcgcgatcctgatacgggccgtactgggcaattaacatggacccgtttgccgcagggctttaagaacagtcccacgatctttgatgaggctcttcaccgcgacctcgcaaatttccgcatccaacacccacaggtaacgttactccagtatgtcgatgatcttttgttagcgggtgccaccaaacaggactgcttggaaggaacgaaagcacttctcttggaactcagtgatttaggttatcgtgtgtccgccaagaaagctcagatttgtcgccgcgaagtgacatacttaggctattcattgcgtgatggtcaacgttggcttactgaggcgcgcaagaagaccgtcgttcaaatccccgcccctaagaccgcgaaacagatgcgtgaatttcttggcacggcaggtttctgccgtttgtggattcctggctcggctacgttagcggcacccctctatccactcacgaaagagaaaggagaattctcttgggccccagaacatcagaaagcgtttgacgccatcaagaaagcgttattaagcgctcctgctcttgcattgcccgatgtcaccaaaccattcacgctctacgtggatgaacgcaaaggcgtagcccgcggtgtgttgacacagaccttaggaccttggcgtcgtcccgtggcctacctctcgaagaaacttgacccagttgcaagtggttggcctgtctgcttgaaagctattgccgcagttgcaatcctcgtcaaagatgccgacaaacttactttgggccagaacattactgttattgcaccacacgcccttgaaaacatcgttcgtcagccacctgatcgctggatgaccaatgctcgcatgacgcattatcagagcctcttgcttaccgaacgcgtgacttttgctccacctgcagccttaaaccccgcaacccttttacccgaagaaacagatgagcctgtgacgcatgactgtcatgagctcttgattgaagaaactggcgtacgcaaggacctcaccgatattccattaacaggtgaggtacttacgtggtttaccgaggggtcctcttatgtcgtcgaaggcaaacgtatggctggtgccgccgttgttgatggcacccgtactatctgggcaagcagcttacccgaaggcacgagtgctcagaaagcacaattgatggccttgacccaagccttacgccttgctgaagggaaatcgatcaatatttacaccgattcacgctatgcattcgccacggcacatgtacacggtgccatctacaaacaacgtggtttgttaacttctgctggccgcgagattaagaacaaagaagaaatcctttccttacttgaagccttacacctccccaaacgtctcgctattattcattgtccagggcatcagaaagcaaaagatcctatcagccgtgggaatcaaatggcagatcgtgtcgctaaacaggcagcccaaggcgttaacttgttgcccatgattgagacccctaaagctcca

SEQ ID NO: 494 - protein, 687 aa, synthetic construct
  REGION 1..687: note = Engineered reverse transcriptase variants
MHHHHHHGGSGVLTLQLDDEYRLYSPLVKPDQNIQFWLEQFPQAWAETGGMGLAKQVPPQVIQLKASATPVSVPQYPLSKEAQEGIRPHVQRLIQQGILVPVQSPWNTPLLPVRKPGTNDYRPVQDLREVNKRVQDIHPTVPNPYNLLCALPPQRSWYTVLDLKDAFFCLRLHPTSQPLFAFEWRDPDTGRTGQLTWTRLPQGFKNSPTIFDEALHRDLANFRIQHPQVTLLQYVDDLLLAGATKQDCLEGTKALLLELSDLGYRVSAKKAQICRREVTYLGYSLRDGQRWLTEARKKTVVQIPAPKTAKQMREFLGTAGFCRLWIPGSATLAAPLYPLTKEKGEFSWAPEHQKAFDAIKKALLSAPALALPDVTKPFTLYVDERKGVARGVLTQTLGPWRRPVAYLSKKLDPVASGWPVCLKAIAAVAILVKDADKLTLGQNITVIAPHALENIVRQPPDRWMTNARMTHYQSLLLTERVTFAPPAALNPATLLPEETDEPVTHDCHELLIEETGVRKDLTDIPLTGEVLTWFTEGSSYVVEGKRMAGAAVVDGTRTIWASSLPEGTSAQKAQLMALTQALRLAEGKSINIYTDSRYAFATAHVHGAIYKQRGLLTSAGREIKNKEEILSLLEALHLPKRLAIIHCPGHQKAKDPISRGNQMADRVAKQAAQGVNLLPMIETPKAP

SEQ ID NO: 495 - DNA, 2061 bp, synthetic construct
  misc_feature 1..2061: note = Engineered reverse transcriptase variants
  source 1..2061: mol_type = other DNA
atgcatcaccatcaccatcatggtggtagcggagtgctgacccttcagctggatgatgaatatcgcttgtacagtccgctggtcaaaccagaccaaaacattcagttctggctcgaacagtttccgcaagcgtgggctgaaactggtggcatgggcctggccaaacaggttcctcctcaggtaatccagttaaaggcatctgccacgccggtgagtgttcctcagtatccgctgtcgaaagaagcgcaagaggggattcgcccacacgtgcagactttgatccagcagggcattctggtaccggttcaaagcccctggaataccccgcttttaccagtccgcaaaccgggtacaaacgattaccgtcctgtgcaagacctgcgcgaagtcaataaacgtgtgcaggatatccacccaaccgttccgaacccgtataatctgttgtgcgcgttaccgccgcagcgttcctggtacacggtgctggacctgaaggacgcgttcttctgtcttcgcctccatcccaccagccagccactgtttgcctttgaatggcgcgatcctgatacgggccgtactgggcaattatgttggacccgtttgccgcagggctttaagaacagtcccacgatctttgatgaggctcttcaccgcgacctcgcaaatttccgcatccaacacccacaggtaacgttactccagtatgtcgatgatcttttgttagcgggtgccaccaaacaggactgcttggaaggaacgaaagcacttctcttggaactcagtgatttaggttatcgtgtgtccgccaagaaagctcagatttgtcgccgcgaagtgacatacttaggctattcattgcgtgatggtcaacgttggcttactcaggcgcgcaagcgtaccgtcgttcaaatccccgcccctaagaccgcgaaacaaatgcgtgaatttcttggcacggcaggtttctgccgtttgtggattcctggctcggctacgttagcggcacccctctatccactcacgaaagagaaaggagaattctcttgggccccagaacatcagaaagcgtttgacgccatcaagaaagcgttattaagcgctcctgctcttgcattgcccgatgtcaccaaaccattcacgctctacgtggatgaacgcaaaggcgtagcccgcggtgtgttgacacagaccttaggaccttggcgtcgtcccgtggcctacctctcgaagaaacttgacccagttgcaagtggttggcctgtctgcttgaaagctattgccgcagttgcaatcctcgtcaaagatgccgacaaacttactttgggccagaacctgactgttattgcaccacacgcccttgaaaacatcgttcgtcagccacctgatcgctggatgaccaatgctcgcatgacgcattatcagagcctcttgcttaccgaacgcgtgacttttgctccacctgcagccttaaaccccgcaacccttttacccgaagaaacagatgagcctgtgacgcatgactgtcatgaactcttgattgaagaaactggcgtacgcaaggacctcaccgatattccattaacaggtgaggtacttacgtggtttaccgaggggtcctcttatgtcgtcgaaggcaaacgtatggctggtgccgccgttgttgatggcacccgtactatctgggcaagcagcttacccgaaggcacgagtgctcagaaagcagagttgatggccttgacccaagccttacgccttgctgaagggaaatcgatcaatatttacaccgattcacgctatgcattcgccacggcacatgtacacggtgccatctacaaacaacgtggtttgttaacttctgctggccgcgagattaagaacaaagaagaaatcctttccttacttgaagccttacacctccccaaacgtctcgctattattcattgtccagggcatcagaaagcaaaagatcctatcagccgtgggaatcaaatggcagatcgtgtcgctaaacaggcagcccaaggcgttaacttgttgcccatgattgagacccctaaagctcca

SEQ ID NO: 496 - protein, 687 aa, synthetic construct
  REGION 1..687: note = Engineered reverse transcriptase variants
MHHHHHHGGSGVLTLQLDDEYRLYSPLVKPDQNIQFWLEQFPQAWAETGGMGLAKQVPPQVIQLKASATPVSVPQYPLSKEAQEGIRPHVQTLIQQGILVPVQSPWNTPLLPVRKPGTNDYRPVQDLREVNKRVQDIHPTVPNPYNLLCALPPQRSWYTVLDLKDAFFCLRLHPTSQPLFAFEWRDPDTGRTGQLCWTRLPQGFKNSPTIFDEALHRDLANFRIQHPQVTLLQYVDDLLLAGATKQDCLEGTKALLLELSDLGYRVSAKKAQICRREVTYLGYSLRDGQRWLTQARKRTVVQIPAPKTAKQMREFLGTAGFCRLWIPGSATLAAPLYPLTKEKGEFSWAPEHQKAFDAIKKALLSAPALALPDVTKPFTLYVDERKGVARGVLTQTLGPWRRPVAYLSKKLDPVASGWPVCLKAIAAVAILVKDADKLTLGQNLTVIAPHALENIVRQPPDRWMTNARMTHYQSLLLTERVTFAPPAALNPATLLPEETDEPVTHDCHELLIEETGVRKDLTDIPLTGEVLTWFTEGSSYVVEGKRMAGAAVVDGTRTIWASSLPEGTSAQKAELMALTQALRLAEGKSINIYTDSRYAFATAHVHGAIYKQRGLLTSAGREIKNKEEILSLLEALHLPKRLAIIHCPGHQKAKDPISRGNQMADRVAKQAAQGVNLLPMIETPKAP

SEQ ID NO: 497 - DNA, 2061 bp, synthetic construct
  misc_feature 1..2061: note = Engineered reverse transcriptase variants
  source 1..2061: mol_type = other DNA
atgcatcaccatcaccatcatggtggtagcggagtgctgacccttcagctggatgatgaatatcgcttgtacagtccgctggtcaaaccagaccaaaacattcagttctggctcgaacagtttccgcaagcgtgggctgaaactggtggcatgggcctggccaaacaggttcctcctcaggtaatccagttaaaggcatctgccacgccggtgtcagttcgtcagtatccgctgtcgaaagaagcgcaagaggggattcgcccacacgtgcagactttgatccagcagggcattctggtaccggttcaaagcccctggaataccccgcttttaccagtccgcaaaccgggtacaaacgattaccgtcctgtgcaagacctgcgcgaagtcaataaacgtgtgcaggatatccacccaaccgttccgaacccgtataatctgttgtgcgcgttaccgccgcagcgttcctggtacacggtgctggacctgaaggacgcgttcttctgtcttcgcctccatcccaccagccagccactgtttgcctttgaatggcgcgatcctgatacgggccgtactgggcaattaacgtggacccgtttgccgcagggctttaagaacagtcccacgatctttgatgaggctcttcaccgcgacctcgcaaatttccgcatccaacacccacaggtaacgttactccagtatgtcgatgatcttttgttagcgggtgccaccaaacaggactgcttggaaggaacgaaagcacttctcttggaactcagtgatttaggttatcgtgtgtccgccaagaaagctcagatttgtcgccgcgaagtgacatacttaggctattcattgcgtgatggtcaacgttggcttactgaggcgcgcaagaagaccgtcgttcaaatccccgcccctaagaccgcgaaacagatgcgtgaatttcttggcacggcaggtttctgccgtttgtggattcctggctttgctacgttagcggcacccctctatccactcacgaaagagaaaggagaattctcttgggccccagaacatcagaaagcgtttgacgccatcaagaaagcgttattaagcgctcctgctcttgcattgcccgatgtcaccaaaccattcacgctctacgtggatgaacgcaaaggcgtagcccgcggtgtgttgacacagaccttaggaccttggcgtcgtcccgtggcctacctctcgaagaaacttgacccagttgcaagtggttggcctgtctgcttgaaagctattgccgcagttgcaatcctcgtcaaagatgccgacaaacttactttgggccagaacctgactgttattgcaccacacgcccttgaaaacatcgttcgtcagccacctgatcgctggatgaccaatgctcgcatgacgcattatcagagcctcttgcttaccgaacgcgtgacttttgctccacctgcagccttaaaccccgcaacccttttacccgaagaaacagatgagcctgtgacgcatgactgtcatcagctcttgattgaagaaactggcgtacgcaaggacctcaccgatattccattaacaggtgaggtacttacgtggtttaccgaggggtcctcttatgtcgtcgaaggcaaacgtatggctggtgccgccgttgttgatggcacccgtactatctgggcaagcagcttacccgaaggcacgagtgctcagaaagcagaattgatggccttgacccaagccttacgccttgctgaagggaaatcgatcaatatttacaccgattcacgctatgcattcgccacggcacatgtacacggtgccatctacaaacaacgtggtttgttaacttctgctggccgcgagattaagaacaaagaagaaatcctttccttacttgaagccttacacctccccaaacgtctcgctattattcattgtccagggcatcagaaagcaaaagatcctatcagccgtgggaatcaaatggcagatcgtgtcgctaaacaggcagcccaaggcgttaacttgttgcccatgattgagacccctaaagctcca

SEQ ID NO: 498 - protein, 687 aa, synthetic construct
  REGION 1..687: note = Engineered reverse transcriptase variants
MHHHHHHGGSGVLTLQLDDEYRLYSPLVKPDQNIQFWLEQFPQAWAETGGMGLAKQVPPQVIQLKASATPVSVRQYPLSKEAQEGIRPHVQTLIQQGILVPVQSPWNTPLLPVRKPGTNDYRPVQDLREVNKRVQDIHPTVPNPYNLLCALPPQRSWYTVLDLKDAFFCLRLHPTSQPLFAFEWRDPDTGRTGQLTWTRLPQGFKNSPTIFDEALHRDLANFRIQHPQVTLLQYVDDLLLAGATKQDCLEGTKALLLELSDLGYRVSAKKAQICRREVTYLGYSLRDGQRWLTEARKKTVVQIPAPKTAKQMREFLGTAGFCRLWIPGFATLAAPLYPLTKEKGEFSWAPEHQKAFDAIKKALLSAPALALPDVTKPFTLYVDERKGVARGVLTQTLGPWRRPVAYLSKKLDPVASGWPVCLKAIAAVAILVKDADKLTLGQNLTVIAPHALENIVRQPPDRWMTNARMTHYQSLLLTERVTFAPPAALNPATLLPEETDEPVTHDCHQLLIEETGVRKDLTDIPLTGEVLTWFTEGSSYVVEGKRMAGAAVVDGTRTIWASSLPEGTSAQKAELMALTQALRLAEGKSINIYTDSRYAFATAHVHGAIYKQRGLLTSAGREIKNKEEILSLLEALHLPKRLAIIHCPGHQKAKDPISRGNQMADRVAKQAAQGVNLLPMIETPKAP

SEQ ID NO: 499 - DNA, 2061 bp, synthetic construct
  misc_feature 1..2061: note = Engineered reverse transcriptase variants
  source 1..2061: mol_type = other DNA
atgcatcaccatcaccatcatggtggtagcggagtgctgacccttcagctggatgatgaatatcgcttgtacagtccgctggtcaaaccagaccaaaacattcagttctggctcgaacagtttccgcaagcgtgggctgaaactggtggcatgggcctggccaaacaggttcctcctcaggtaatccagttaaaggcatctgccacgccggtgatggttcgtcagtatccgctgtcgaaagaagcgcaagaggggattcgcccacacgtgcagcgtttgatccagcagggcattctggtaccggttcaaagcccctggaataccccgcttttaccagtccgcaaaccgggtacaaacgattaccgtcctgtgcaagacctgcgcgaagtcaataaacgtgtgcaggatatccacccaaccgttccgaacccgtataatctgttgtgcgcgttaccgccgcagcgttcctggtacacggtgctggacctgaaggacgcgttcttctgtcttcgcctccatcccaccagccagccactgtttgcctttgaatggcgcgatcctgatacgggccgtactgggcaattaacatggacccgtttgccgcagggctttaagaacagtcccacgatctttgatgaggctcttcaccgcgacctcgcaaatttccgcatccaacacccacaggtaacgttactccagtatgtcgatgatcttttgttagcgggtgccaccaaacaggactgcttggaaggaacgaaagcacttctcttggaactcagtgatttaggttatcgtgtgtccgccaagaaagctcagatttgtcgccgcgaagtgacatacttaggctattcattgcgtgatggtcaacgttggcttactgaggcgcgcaagcgtaccgtcgttcaaatccccgcccctaagaccgcgaaacaaatgcgtgaatttcttggcacggcaggtttctgccgtttgtggattcctggcttcgctacgttagcggcacccctctatccactcacgaaagagaaaggagaattctcttgggccccagaacatcagaaagcgtttgacgccatcaagaaagcgttattaagcgctcctgctcttgcattgcccgatgtcaccaaaccattcacgctctacgtggatgaacgcaaaggcgtagcccgcggtgtgttgacacagaccttaggaccttggcgtcgtcccgtggcctacctctcgaagaaacttgacccagttgcaagtggttggcctgtctgcttgaaagctattgccgcagttgcaatcctcgtcaaagatgccgacaaacttactttgggccagaacctgactgttattgcaccacacgcccttgaaaacatcgttcgtcagccacctgatcgctggatgaccaatgctcgcatgacgcattatcagagcctcttgcttaccgaacgcgtgacttttgctccacctgcagccttaaaccccgcaacccttttacccgaagaaacagatgagcctgtgacgcatgactgtcatgaactcttgattgaagaaactggcgtacgcaaggacctcaccgatattccattaacaggtgaggtacttacgtggtttaccgaggggtcctcttatgtcgtcgaaggcaaacgtatggctggtgccgccgttgttgatggcacccgtactatctgggcaagcagcttacccgaaggcacgagtgctcagaaagcagagttgatggccttgacccaagccttacgccttgctgaagggaaatcgatcaatatttacaccgattcacgctatgcattcgccacggcacatgtacacggtgccatctacaaacaacgtggtttgttaacttctgctggccgcgagattaagaacaaagaagaaatcctttccttacttgaagccttacacctccccaaacgtctcgctattattcattgtccagggcatcagaaagcaaaagatcctatcagccgtgggaatcaaatggcagatcgtgtcgctaaacaggcagcccaaggcgttaacttgttgcccatgattgagacccctaaagctcca

SEQ ID NO: 500 - protein, 687 aa, synthetic construct
  REGION 1..687: note = Engineered reverse transcriptase variants
MHHHHHHGGSGVLTLQLDDEYRLYSPLVKPDQNIQFWLEQFPQAWAETGGMGLAKQVPPQVIQLKASATPVMVRQYPLSKEAQEGIRPHVQRLIQQGILVPVQSPWNTPLLPVRKPGTNDYRPVQDLREVNKRVQDIHPTVPNPYNLLCALPPQRSWYTVLDLKDAFFCLRLHPTSQPLFAFEWRDPDTGRTGQLTWTRLPQGFKNSPTIFDEALHRDLANFRIQHPQVTLLQYVDDLLLAGATKQDCLEGTKALLLELSDLGYRVSAKKAQICRREVTYLGYSLRDGQRWLTEARKRTVVQIPAPKTAKQMREFLGTAGFCRLWIPGFATLAAPLYPLTKEKGEFSWAPEHQKAFDAIKKALLSAPALALPDVTKPFTLYVDERKGVARGVLTQTLGPWRRPVAYLSKKLDPVASGWPVCLKAIAAVAILVKDADKLTLGQNLTVIAPHALENIVRQPPDRWMTNARMTHYQSLLLTERVTFAPPAALNPATLLPEETDEPVTHDCHELLIEETGVRKDLTDIPLTGEVLTWFTEGSSYVVEGKRMAGAAVVDGTRTIWASSLPEGTSAQKAELMALTQALRLAEGKSINIYTDSRYAFATAHVHGAIYKQRGLLTSAGREIKNKEEILSLLEALHLPKRLAIIHCPGHQKAKDPISRGNQMADRVAKQAAQGVNLLPMIETPKAP

SEQ ID NO: 501 - DNA, 2061 bp, synthetic construct
  misc_feature 1..2061: note = Engineered reverse transcriptase variants
  source 1..2061: mol_type = other DNA
atgcatcaccatcaccatcatggtggtagcggagtgctgacccttcagctggatgatgaatatcgcttgtacagtccgctggtcaaaccagaccaaaacattcagttctggctcgaacagtttccgcaagcgtgggctgaaactggtggcatgggcctggccaaacaggttcctcctcaggtaatccagttaaaggcatctgccacgccggtgatggttcgtcagtatccgctgtcgaaagaagcgcaagaggggattcgcccacacgtgcagcgtttgatccagcagggcattctggtaccggttcaaagcccctggaataccccgcttttaccagtccgcaaaccgggtacaaacgattaccgtcctgtgcaagacctgcgcgaagtcaataaacgtgtgcaggatatccacccaaccgttccgaacccgtataatctgttgtgcgcgttaccgccgcagcgttcctggtacacggtgctggacctgaaggacgcgttcttctgtcttcgcctccatcccaccagccagccactgtttgcctttgaatggcgcgatcctgatacgggccgtactgggcaattaacatggacccgtttgccgcagggctttaagaacagtcccacgatctttgatgaggctcttcaccgcgacctcgcaaatttccgcatccaacacccacaggtaacgttactccagtatgtcgatgatcttttgttagcgggtgccaccaaacaggactgcttggaaggaacgaaagcacttctcttggaactcagtgatttaggttatcgtgtgtccgccaagaaagctcagatttgtcgccgcgaagtgacatacttaggctattcattgcgtgatggtcaacgttggcttactcaggcgcgcaagcgtaccgtcgttcaaatccccgcccctaagaccgcgaaagcaatgcgtgaatttcttggcacggcaggtttctgccgtttgtggattcctggctcggctacgttagcggcacccctctatccactcacgaaagaggccggagaattctcttgggccccagaacatcagaaagcgtttgacgccatcaagaaagcgttattaagcgctcctgctcttgcattgcccgatgtcaccaaaccattcacgctctacgtggatgaacgcaaaggcgtagcccgcggtgtgttgacacagaccttaggaccttggcgtcgtcccgtggcctacctctcgaagaaacttgacccagttgcaagtggttggcctgtctgcttgaaagctattgccgcagttgcaatcctcgtcaaagatgccgacaaacttactttgggccagaacattactgttattgcaccacacgcccttgaaaacatcgttcgtcagccacctgatcgctggatgaccaatgctcgcatgacgcattatcagagcctcttgcttaccgaacgcgtgacttttgctccacctgcagccttaaaccccgcaacccttttacccgaagaaacagatgagcctgtgacgcatgactgtcatgagctcttgattgaagaaactggcgtacgcaaggacctcaccgatattccattaacaggtgaggtacttacgtggtttaccgaggggtcctcttatgtcgtcgaaggcaaacgtatggctggtgccgccgttgttgatggcacccgtactatctgggcaagcagcttacccgaaggcacgagtgctcagaaagcagagttgatggccttgacccaagccttacgccttgctgaagggaaatcgatcaatatttacaccgattcacgctatgcattcgccacggcacatgtacacggtgccatctacaaacaacgtggtttgttaacttctgctggccgcgagattaagaacaaagaagaaatcctttccttacttgaagccttacacctccccaaacgtctcgctattattcattgtccagggcatcagaaagcaaaagatcctatcagccgtgggaatcaaatggcagatcgtgtcgctaaacaggcagcccaaggcgttaacttgttgcccatgattgagacccctaaagctcca

SEQ ID NO: 502 - protein, 687 aa, synthetic construct
  REGION 1..687: note = Engineered reverse transcriptase variants
MHHHHHHGGSGVLTLQLDDEYRLYSPLVKPDQNIQFWLEQFPQAWAETGGMGLAKQVPPQVIQLKASATPVMVRQYPLSKEAQEGIRPHVQRLIQQGILVPVQSPWNTPLLPVRKPGTNDYRPVQDLREVNKRVQDIHPTVPNPYNLLCALPPQRSWYTVLDLKDAFFCLRLHPTSQPLFAFEWRDPDTGRTGQLTWTRLPQGFKNSPTIFDEALHRDLANFRIQHPQVTLLQYVDDLLLAGATKQDCLEGTKALLLELSDLGYRVSAKKAQICRREVTYLGYSLRDGQRWLTQARKRTVVQIPAPKTAKAMREFLGTAGFCRLWIPGSATLAAPLYPLTKEAGEFSWAPEHQKAFDAIKKALLSAPALALPDVTKPFTLYVDERKGVARGVLTQTLGPWRRPVAYLSKKLDPVASGWPVCLKAIAAVAILVKDADKLTLGQNITVIAPHALENIVRQPPDRWMTNARMTHYQSLLLTERVTFAPPAALNPATLLPEETDEPVTHDCHELLIEETGVRKDLTDIPLTGEVLTWFTEGSSYVVEGKRMAGAAVVDGTRTIWASSLPEGTSAQKAELMALTQALRLAEGKSINIYTDSRYAFATAHVHGAIYKQRGLLTSAGREIKNKEEILSLLEALHLPKRLAIIHCPGHQKAKDPISRGNQMADRVAKQAAQGVNLLPMIETPKAP

SEQ ID NO: 503 - DNA, 2061 bp, synthetic construct
  misc_feature 1..2061: note = Engineered reverse transcriptase variants
  source 1..2061: mol_type = other DNA
atgcatcaccatcaccatcatggtggtagcggagtgctgacccttcagctggatgatgaatatcgcttgtacagtccgctggtcaaaccagaccaaaacattcagttctggctcgaacagtttccgcaagcgtgggctgaaactggtggcatgggcctggccaaacaggttcctcctcaggtaatccagttaaaggcatctgccacgccggtgatggttcgtcagtatccgctgtcgaaagaagcgcaagaggggattcgcccacacgtgcagcgtttgatccagcagggcattctggtaccggttcaaagcccctggaataccccgcttttaccagtccgcaaaccgggtacaaacgattaccgtcctgtgcaagacctgcgcgaagtcaataaacgtgttcaggatatccacccaaccgttccgaacccgtataatctgttgtgcgcgttaccgccgcagcgttcctggtacacggtgctggacctgaaggacgcgttcttctgtcttcgcctccatcccaccagccagccactgtttgcctttgaatggcgcgatcctgatacgggccgtactgggcaattaacgtggacccgtttgccgcagggctttaagaacagtcccacgatctttgatgaggctcttcaccgcgacctcgcaaatttccgcatccaacacccacaggtaacgttactccagtatgtcgatgatcttttgttagcgggtgccaccaaacaggactgcttggaaggaacgaaagcacttctcttggaactcagtgatttaggttatcgtgtgtccgccaagaaagctcagatttgtcgccgcgaagtgacatacttaggctattcattgcgtgatggtcaacgttggcttactcaggcgcgcaagaagaccgtcgttcaaatccccgcccctaagaccgcgaaacaaatgcgtgaatttcttggcacggcaggtttctgccgtttgtggattcctggcttcgctacgttagcggcacccctctatccactcacgaaagagaaaggagaattctcttgggccccagaacatcagaaagcgtttgacgccatcaagaaagcgttattaagcgctcctgctcttgcattgcccgatgtcaccaaaccattcacgctctacgtggatgaacgcaaaggcgtagcccgcggtgtgttgacacagaccttaggaccttggcgtcgtcccgtggcctacctctcgaagaaacttgacccagttgcaagtggttggcctgtctgcttgaaagctattgccgcagttgcaatcctcgtcaaagatgccgacaaacttactttgggccagaacattactgttattgcaccacacgcccttgaaaacatcgttcgtcagccacctgatcgctggatgaccaatgctcgcatgacgcattatcagagcctcttgcttaccgaacgcgtgacttttgctccacctgcagccttaaaccccgcaacccttttacccgaagaaacagatgagcctgtgacgcatgactgtcatgaactcttgattgaagaaactggcgtacgcaaggacctcaccgatattccattaacaggtgaggtacttacgtggtttaccgaggggtcctcttatgtcgtcgaaggcaaacgtatggctggtgccgccgttgttgatggcacccgtactatctgggcaagcagcttacccgaaggcacgagtgctcagaaagcagagttgatggccttgacccaagccttacgccttgctgaagggaaatcgatcaatatttacaccgattcacgctatgcattcgccacggcacatgtacacggtgccatctacaaacaacgtggtttgttaacttctgctggccgcgagattaagaacaaagaagaaatcctttccttacttgaagccttacacctccccaaacgtctcgctattattcattgtccagggcatcagaaagcaaaagatcctatcagccgtgggaatcaaatggcagatcgtgtcgctaaacaggcagcccaaggcgttaacttgttgcccatgattgagacccctaaagctcca

SEQ ID NO: 504 - protein, 687 aa, synthetic construct
  REGION 1..687: note = Engineered reverse transcriptase variants
MHHHHHHGGSGVLTLQLDDEYRLYSPLVKPDQNIQFWLEQFPQAWAETGGMGLAKQVPPQVIQLKASATPVMVRQYPLSKEAQEGIRPHVQRLIQQGILVPVQSPWNTPLLPVRKPGTNDYRPVQDLREVNKRVQDIHPTVPNPYNLLCALPPQRSWYTVLDLKDAFFCLRLHPTSQPLFAFEWRDPDTGRTGQLTWTRLPQGFKNSPTIFDEALHRDLANFRIQHPQVTLLQYVDDLLLAGATKQDCLEGTKALLLELSDLGYRVSAKKAQICRREVTYLGYSLRDGQRWLTQARKKTVVQIPAPKTAKQMREFLGTAGFCRLWIPGFATLAAPLYPLTKEKGEFSWAPEHQKAFDAIKKALLSAPALALPDVTKPFTLYVDERKGVARGVLTQTLGPWRRPVAYLSKKLDPVASGWPVCLKAIAAVAILVKDADKLTLGQNITVIAPHALENIVRQPPDRWMTNARMTHYQSLLLTERVTFAPPAALNPATLLPEETDEPVTHDCHELLIEETGVRKDLTDIPLTGEVLTWFTEGSSYVVEGKRMAGAAVVDGTRTIWASSLPEGTSAQKAELMALTQALRLAEGKSINIYTDSRYAFATAHVHGAIYKQRGLLTSAGREIKNKEEILSLLEALHLPKRLAIIHCPGHQKAKDPISRGNQMADRVAKQAAQGVNLLPMIETPKAP

SEQ ID NO: 505 - DNA, 2061 bp, synthetic construct
  misc_feature 1..2061: note = Engineered reverse transcriptase variants
  source 1..2061: mol_type = other DNA
atgcatcaccatcaccatcatggtggtagcggagtgctgacccttcagctggatgatgaatatcgcttgtacagtccgctggtcaaaccagaccaaaacattcagttctggctcgaacagtttccgcaagcgtgggctgaaactggtggcatgggcctggccaaacaggttcctcctcaggtaatccagttaaaggcatctgccacgccggtgatggttcgtcagtatccgctgtcgaaagaagcgcaagaggggattcgcccacacgtgcagcgtttgatccagcagggcattctggtaccggttcaaagcccctggaataccccgcttttaccagtccgcaaaccgggtacaaacgattaccgtcctgtgcaagacctgcgcgaagtcaataaacgtgtgcaggatatccacccaaccgttccgaacccgtataatctgttgtgcgcgttaccgccgcagcgttcctggtacacggtgctggacctgaaggacgcgttcttctgtcttcgcctccatcccaccagccagccactgtttgcctttgaatggcgcgatcctgatacgggccgtactgggcaattaacatggacccgtttgccgcagggctttaagaacagtcccacgatctttgatgaggctcttcaccgcgacctcgcaaatttccgcatccaacacccacaggtaacgttactccagtatgtcgatgatcttttgttagcgggtgccaccaaacaggactgcttggaaggaacgaaagcacttctcttggaactcagtgatttaggttatcgtgtgtccgccaagaaagctcagatttgtcgccgcgaagtgacatacttaggctattcattgcgtgatggtcaacgttggcttactcaggcgcgcaagaagaccgtcgttcaaatccccgcccctaagaccgcgaaagcaatgcgtgaatttcttggcacggcaggtttctgccgtttgtggattcctggctcggctacgttagcggcacccctctatccactcacgaaagagaaaggagaattctcttgggccccagaacatcagaaagcgtttgacgccatcaagaaagcgttattaagcgctcctgctcttgcattgcccgatgtcaccaaaccattcacgctctacgtggatgaacgcaaaggcgtagcccgcggtgtgttgacacagaccttaggaccttggcgtcgtcccgtggcctacctctcgaagaaacttgacccagttgcaagtggttggcctgtctgcttgaaagctattgccgcagttgcaatcctcgtcaaagatgccgacaaacttactttgggccagaacattactgttattgcaccacacgcccttgaaaacatcgttcgtcagccacctgatcgctggatgaccaatgctcgcatgacgcattatcagagcctcttgcttaccgaacgcgtgacttttgctccacctgcagccttaaaccccgcaacccttttacccgaagaaacagatgagcctgtgacgcatgactgtcatgaactcttgattgaagaaactggcgtacgcaaggacctcaccgatattccattaacaggtgaggtacttacgtggtttaccgaggggtcctcttatgtcgtcgaaggcaaacgtatggctggtgccgccgttgttgatggcacccgtactatctgggcaagcagcttacccgaaggcacgagtgctcagaaagcagagttgatggccttgacccaagccttacgccttgctgaagggaaatcgatcaatatttacaccgattcacgctatgcattcgccacggcacatgtacacggtgccatctacaaacaacgtggtttgttaacttctgctggccgcgagattaagaacaaagaagaaatcctttccttacttgaagccttacacctccccaaacgtctcgctattattcattgtccagggcatcagaaagcaaaagatcctatcagccgtgggaatcaaatggcagatcgtgtcgctaaacaggcagcccaaggcgttaacttgttgcccatgattgagacccctaaagctcca

SEQ ID NO: 506 - protein, 687 aa, synthetic construct
  REGION 1..687: note = Engineered reverse transcriptase variants
MHHHHHHGGSGVLTLQLDDEYRLYSPLVKPDQNIQFWLEQFPQAWAETGGMGLAKQVPPQVIQLKASATPVMVRQYPLSKEAQEGIRPHVQRLIQQGILVPVQSPWNTPLLPVRKPGTNDYRPVQDLREVNKRVQDIHPTVPNPYNLLCALPPQRSWYTVLDLKDAFFCLRLHPTSQPLFAFEWRDPDTGRTGQLTWTRLPQGFKNSPTIFDEALHRDLANFRIQHPQVTLLQYVDDLLLAGATKQDCLEGTKALLLELSDLGYRVSAKKAQICRREVTYLGYSLRDGQRWLTQARKKTVVQIPAPKTAKAMREFLGTAGFCRLWIPGSATLAAPLYPLTKEKGEFSWAPEHQKAFDAIKKALLSAPALALPDVTKPFTLYVDERKGVARGVLTQTLGPWRRPVAYLSKKLDPVASGWPVCLKAIAAVAILVKDADKLTLGQNITVIAPHALENIVRQPPDRWMTNARMTHYQSLLLTERVTFAPPAALNPATLLPEETDEPVTHDCHELLIEETGVRKDLTDIPLTGEVLTWFTEGSSYVVEGKRMAGAAVVDGTRTIWASSLPEGTSAQKAELMALTQALRLAEGKSINIYTDSRYAFATAHVHGAIYKQRGLLTSAGREIKNKEEILSLLEALHLPKRLAIIHCPGHQKAKDPISRGNQMADRVAKQAAQGVNLLPMIETPKAP

SEQ ID NO: 507 - DNA, 2061 bp, synthetic construct
  misc_feature 1..2061: note = Engineered reverse transcriptase variants
  source 1..2061: mol_type = other DNA
atgcatcaccatcaccatcatggtggtagcggagtgctgacccttcagctggatgatgaatatcgcttgtacagtccgctggtcaaaccagaccaaaacattcagttctggctcgaacagtttccgcaagcgtgggctgaaactggtggcatgggcctggccaaacaggttcctcctcaggtaatccagttaaaggcatctgccacgccggtgatggttcgtcagtatccgctgtcgaaagaagcgcaagaggggattcgcccacacgtgcagcgtttgatccagcagggcattctggtaccggttcaaagcccctggaataccccgcttttaccagtccgcaaaccgggtacaaacgattaccgtcctgtgcaagacctgcgcgaagtcaataaacgtgtgcaggatatccacccaaccgttccgaacccgtataatctgttgtgcgcgttaccgccgcagcgttcctggtacacggtgctggacctgaaggacgcgttcttctgtcttcgcctccatcccaccagccagccactgtttgcctttgaatggcgcgatcctgatacgggccgtactgggcaattaacgtggacccgtttgccgcagggctttaagaacagtcccacgatctttgatgaggctcttcaccgcgacctcgcaaatttccgcatccaacacccacaggtaacgttactccagtatgtcgatgatcttttgttagcgggtgccaccaaacaggactgcttggaaggaacgaaagcacttctcttggaactcagtgatttaggttatcgtgtgtccgccaagaaagctcagatttgtcgccgcgaagtgacatacttaggctattcattgcgtgatggtcaacgttggcttactgaggcgcgcaagcgtaccgtcgttcaaatccccgcccctaagaccgcgaaacagatgcgtgaatttcttggcacggcaggtttctgccgtttgtggattcctggcttcgctacgttagcggcacccctctatccactcacgaaagagaaaggagaattctcttgggccccagaacatcagaaagcgtttgacgccatcaagaaagcgttattaagcgctcctgctcttgcattgcccgatgtcaccaaaccattcacgctctacgtggatgaacgcaaaggcgtagcccgcggtgtgttgacacagaccttaggaccttggcgtcgtcccgtggcctacctctcgaagaaacttgacccagttgcaagtggttggcctgtctgcttgaaagctattgccgcagttgcaatcctcgtcaaagatgccgacaaacttactttgggccagaacctgactgttattgcaccacacgcccttgaaaacatcgttcgtcagccacctgatcgctggatgaccaatgctcgcatgacgcattatcagagcctcttgcttaccgaacgcgtgacttttgctccacctgcagccttaaaccccgcaacccttttacccgaagaaacagatgagcctgtgacgcatgactgtcatcagctcttgattgaagaaactggcgtacgcaaggacctcaccgatattccattaacaggtgaggtacttacgtggtttaccgaggggtcctcttatgtcgtcgaaggcaaacgtatggctggtgccgccgttgttgatggcacccgtactatctgggcaagcagcttacccgaaggcacgagtgctcagaaagcagaattgatggccttgacccaagccttacgccttgctgaagggaaatcgatcaatatttacaccgattcacgctatgcattcgccacggcacatgtacacggtgccatctacaaacaacgtggtttgttaacttctgctggccgcgagattaagaacaaagaagaaatcctttccttacttgaagccttacacctccccaaacgtctcgctattattcattgtccagggcatcagaaagcaaaagatcctatcagccgtgggaatcaaatggcagatcgtgtcgctaaacaggcagcccaaggcgttaacttgttgcccatgattgagacccctaaagctcca

SEQ ID NO: 508 - protein, 687 aa, synthetic construct
  REGION 1..687: note = Engineered reverse transcriptase variants
MHHHHHHGGSGVLTLQLDDEYRLYSPLVKPDQNIQFWLEQFPQAWAETGGMGLAKQVPPQVIQLKASATPVMVRQYPLSKEAQEGIRPHVQRLIQQGILVPVQSPWNTPLLPVRKPGTNDYRPVQDLREVNKRVQDIHPTVPNPYNLLCALPPQRSWYTVLDLKDAFFCLRLHPTSQPLFAFEWRDPDTGRTGQLTWTRLPQGFKNSPTIFDEALHRDLANFRIQHPQVTLLQYVDDLLLAGATKQDCLEGTKALLLELSDLGYRVSAKKAQICRREVTYLGYSLRDGQRWLTEARKRTVVQIPAPKTAKQMREFLGTAGFCRLWIPGFATLAAPLYPLTKEKGEFSWAPEHQKAFDAIKKALLSAPALALPDVTKPFTLYVDERKGVARGVLTQTLGPWRRPVAYLSKKLDPVASGWPVCLKAIAAVAILVKDADKLTLGQNLTVIAPHALENIVRQPPDRWMTNARMTHYQSLLLTERVTFAPPAALNPATLLPEETDEPVTHDCHQLLIEETGVRKDLTDIPLTGEVLTWFTEGSSYVVEGKRMAGAAVVDGTRTIWASSLPEGTSAQKAELMALTQALRLAEGKSINIYTDSRYAFATAHVHGAIYKQRGLLTSAGREIKNKEEILSLLEALHLPKRLAIIHCPGHQKAKDPISRGNQMADRVAKQAAQGVNLLPMIETPKAP

SEQ ID NO: 509 - DNA, 2061 bp, synthetic construct
  misc_feature 1..2061: note = Engineered reverse transcriptase variants
  source 1..2061: mol_type = other DNA
atgcatcaccatcaccatcatggtggtagcggagtgctgacccttcagctggatgatgaatatcgcttgtacagtccgctggtcaaaccagaccaaaacattcagttctggctcgaacagtttccgcaagcgtgggctgaaactggtggcatgggcctggccaaacaggttcctcctcaggtaatccagttaaaggcatctgccacgccggtgatggttcgtcagtatccgctgtcgaaagaagcggcagaggggattcgcccacacgtgcagcgtttgatccagcagggcattctggtaccggttcaaagcccctggaataccccgcttttaccagtccgcaaaccgggtacaaacgattaccgtcctgtgcaagacctgcgcgaagtcaataaacgtgtgcaggatatccacccaaccgttccgaacccgtataatctgttgtgcgcgttaccgccgcagcgttcctggtacacggtgctggacctgaaggacgcgttcttctgtcttcgcctccatcccaccagccagccactgtttgcctttgaatggcgcgatcctgatacgggccgtactgggcaattaacatggacccgtttgccgcagggctttaagaacagtcccacgatctttgatgaggctcttcaccgcgacctcgcaaatttccgcatccaacacccacaggtaacgttactccagtatgtcgatgatcttttgttagcgggtgccaccaaacaggactgcttggaaggaacgaaagcacttctcttggaactcagtgatttaggttatcgtgtgtccgccaagaaagctcagatttgtcgccgcgaagtgacatacttaggctattcattgcgtgatggtcaacgttggcttactgaggcgcgcaagaagaccgtcgttcaaatccccgcccctaagaccgcgaaacagatgcgtgaatttcttggcacggcaggtttctgccgtttgtggattcctggctttgctacgttagcggcacccctctatccactcacgaaagaggccggagaattctcttgggccccagaacatcagaaagcgtttgacgccatcaagaaagcgttattaagcgctcctgctcttgcattgcccgatgtcaccaaaccattcacgctctacgtggatgaacgcaaaggcgtagcccgcggtgtgttgacacagaccttaggaccttggcgtcgtcccgtggcctacctctcgaagaaacttgacccagttgcaagtggttggcctgtctgcttgaaagctattgccgcagttgcaatcctcgtcaaagatgccgacaaacttactttgggccagaacattactgttattgcaccacacgcccttgaaaacatcgttcgtcagccacctgatcgctggatgaccaatgctcgcatgacgcattatcagagcctcttgcttaccgaacgcgtgacttttgctccacctgcagccttaaaccccgcaacccttttacccgaagaaacagatgagcctgtgacgcatgactgtcatgaactcttgattgaagaaactggcgtacgcaaggacctcaccgatattccattaacaggtgaggtacttacgtggtttaccgaggggtcctcttatgtcgtcgaaggcaaacgtatggcgggtgccgccgttgttgatggcacccgtactatctgggcaagcagcttacccgaaggcacgagtgctcagaaagcagagttgatggccttgacccaagccttacgccttgctgaagggaaatcgatcaatatttacaccgattcacgctatgcattcgccacggcacatgtacacggtgccatctacaaacaacgtggtttgttaacttctgctggccgcgagattaagaacaaagaagaaatcctttccttacttgaagccttacacctccccaaacgtctcgctattattcattgtccagggcatcagaaagcaaaagatcctatcagccgtgggaatcaaatggcagatcgtgtcgctaaacaggcagcccaaggcgttaacttgttgcccatgattgagacccctaaagctcca

SEQ ID NO: 510 - protein, 687 aa, synthetic construct
  REGION 1..687: note = Engineered reverse transcriptase variants
MHHHHHHGGSGVLTLQLDDEYRLYSPLVKPDQNIQFWLEQFPQAWAETGGMGLAKQVPPQVIQLKASATPVMVRQYPLSKEAAEGIRPHVQRLIQQGILVPVQSPWNTPLLPVRKPGTNDYRPVQDLREVNKRVQDIHPTVPNPYNLLCALPPQRSWYTVLDLKDAFFCLRLHPTSQPLFAFEWRDPDTGRTGQLTWTRLPQGFKNSPTIFDEALHRDLANFRIQHPQVTLLQYVDDLLLAGATKQDCLEGTKALLLELSDLGYRVSAKKAQICRREVTYLGYSLRDGQRWLTEARKKTVVQIPAPKTAKQMREFLGTAGFCRLWIPGFATLAAPLYPLTKEAGEFSWAPEHQKAFDAIKKALLSAPALALPDVTKPFTLYVDERKGVARGVLTQTLGPWRRPVAYLSKKLDPVASGWPVCLKAIAAVAILVKDADKLTLGQNITVIAPHALENIVRQPPDRWMTNARMTHYQSLLLTERVTFAPPAALNPATLLPEETDEPVTHDCHELLIEETGVRKDLTDIPLTGEVLTWFTEGSSYVVEGKRMAGAAVVDGTRTIWASSLPEGTSAQKAELMALTQALRLAEGKSINIYTDSRYAFATAHVHGAIYKQRGLLTSAGREIKNKEEILSLLEALHLPKRLAIIHCPGHQKAKDPISRGNQMADRVAKQAAQGVNLLPMIETPKAP

SEQ ID NO: 511 - DNA, 2061 bp, synthetic construct
  misc_feature 1..2061: note = Engineered reverse transcriptase variants
  source 1..2061: mol_type = other DNA
atgcatcaccatcaccatcatggtggtagcggagtgctgacccttcagctggatgatgaatatcgcttgtacagtccgctggtcaaaccagaccaaaacattcagttctggctcgaacagtttccgcaagcgtgggctgaaactggtggcatgggcctggccaaacaggttcctcctcaggtaatccagttaaaggcatctgccacgccggtgatggttcctcagtatccgctgtcgaaagaagcgcaagaggggattcgcccacacgtgcagcgtttgatccagcagggcattctggtaccggttcaaagcccctggaataccccgcttttaccagtccgcaaaccgggtacaaacgattaccgtcctgtgcaagacctgcgcgaagtcaataaacgtgtgcaggatatccacccaaccgttccgaacccgtataatctgttgtgcgcgttaccgccgcagcgttcctggtacacggtgctggacctgaaggacgcgttcttctgtcttcgcctccatcccaccagccagccactgtttgcctttgaatggcgcgatcctgatacgggccgtactgggcaattaacgtggacccgtttgccgcagggctttaagaacagtcccacgatctttgatgaggctcttcaccgcgacctcgcaaatttccgcatccaacacccacaggtaacgttactccagtatgtcgatgatcttttgttagcgggtgccaccaaacaggactgcttggaaggaacgaaagcacttctcttggaactcagtgatttaggttatcgtgtgtccgccaagaaagctcagatttgtcgccgcgaagtgacatacttaggctattcattgcgtgatggtcaacgttggcttactcaggcgcgcaagaagaccgtcgttcaaatccccgcccctaagaccgcgaaacagatgcgtgaatttcttggcacggcaggtttctgccgtttgtggattcctggcttcgctacgttagcggcacccctctatccactcacgaaagagaaaggagaattctcttgggccccagaacatcagaaagcgtttgacgccatcaagaaagcgttattaagcgctcctgctcttgcattgcccgatgtcaccaaaccattcacgctctacgtggatgaacgcaaaggcgtagcccgcggtgtgttgacacagaccttaggaccttggcgtcgtcccgtggcctacctctcgaagaaacttgacccagttgcaagtggttggcctgtctgcttgaaagctattgccgcagttgcaatcctcgtcaaagatgccgacaaacttactttgggccagaacattactgttattgcaccacacgcccttgaaaacatcgttcgtcagccacctgatcgctggatgaccaatgctcgcatgacgcattatcagagcctcttgcttaccgaacgcgtgacttttgctccacctgcagccttaaaccccgcaacccttttacccgaagaaacagatgagcctgtgacgcatgactgtcatgagctcttgattgaagaaactggcgtacgcaaggacctcaccgatattccattaacaggtgaggtacttacgtggtttaccgaggggtcctcttatgtcgtcgaaggcaaacgtatggctggtgccgccgttgttgatggcacccgtactatctgggcaagcagcttacccgaaggcacgagtgctcagaaagcagagttgatggccttgacccaagccttacgccttgctgaagggaaatcgatcaatatttacaccgattcacgctatgcattcgccacggcacatgtacacggtgccatctacaaacaacgtggtttgttaacttctgctggccgcgagattaagaacaaagaagaaatcctttccttacttgaagccttacacctccccaaacgtctcgctattattcattgtccagggcatcagaaagcaaaagatcctatcagccgtgggaatcaaatggcagatcgtgtcgctaaacaggcagcccaaggcgttaacttgttgcccatgattgagacccctaaagctcca

SEQ ID NO: 512 - protein, 687 aa, synthetic construct
  REGION 1..687: note = Engineered reverse transcriptase variants
MHHHHHHGGSGVLTLQLDDEYRLYSPLVKPDQNIQFWLEQFPQAWAETGGMGLAKQVPPQVIQLKASATPVMVPQYPLSKEAQEGIRPHVQRLIQQGILVPVQSPWNTPLLPVRKPGTNDYRPVQDLREVNKRVQDIHPTVPNPYNLLCALPPQRSWYTVLDLKDAFFCLRLHPTSQPLFAFEWRDPDTGRTGQLTWTRLPQGFKNSPTIFDEALHRDLANFRIQHPQVTLLQYVDDLLLAGATKQDCLEGTKALLLELSDLGYRVSAKKAQICRREVTYLGYSLRDGQRWLTQARKKTVVQIPAPKTAKQMREFLGTAGFCRLWIPGFATLAAPLYPLTKEKGEFSWAPEHQKAFDAIKKALLSAPALALPDVTKPFTLYVDERKGVARGVLTQTLGPWRRPVAYLSKKLDPVASGWPVCLKAIAAVAILVKDADKLTLGQNITVIAPHALENIVRQPPDRWMTNARMTHYQSLLLTERVTFAPPAALNPATLLPEETDEPVTHDCHELLIEETGVRKDLTDIPLTGEVLTWFTEGSSYVVEGKRMAGAAVVDGTRTIWASSLPEGTSAQKAELMALTQALRLAEGKSINIYTDSRYAFATAHVHGAIYKQRGLLTSAGREIKNKEEILSLLEALHLPKRLAIIHCPGHQKAKDPISRGNQMADRVAKQAAQGVNLLPMIETPKAP

SEQ ID NO: 513 - DNA, 2061 bp, synthetic construct
  misc_feature 1..2061: note = Engineered reverse transcriptase variants
  source 1..2061: mol_type = other DNA
atgcatcaccatcaccatcatggtggtagcggagtgctgacccttcagctggatgatgaatatcgcttgtacagtccgctggtcaaaccagaccaaaacattcagttctggctcgaacagtttccgcaagcgtgggctgaaactggtggcatgggcctggccaaacaggttcctcctcaggtaatccagttaaaggcatctgccacgccggtgatggttcctcagtatccgctgtcgaaagaagcggcagaggggattcgcccacacgtgcagcgtttgatccagcagggcattctggtaccggttcaaagcccctggaataccccgcttttaccagtccgcaaaccgggtacaaacgattaccgtcctgtgcaagacctgcgcgaagtcaataaacgtgtgcaggatatccacccaaccgttccgaacccgtataatctgttgtgcgcgttaccgccgcagcgttcctggtacacggtgctggacctgaaggacgcgttcttctgtcttcgcctccatcccaccagccagccactgtttgcctttgaatggcgcgatcctgatacgggccgtactgggcaattaacgtggacccgtttgccgcagggctttaagaacagtcccacgatctttgatgaggctcttcaccgcgacctcgcaaatttccgcatccaacacccacaggtaacgttactccagtatgtcgatgatcttttgttagcgggtgccaccaaacaggactgcttggaaggaacgaaagcacttctcttggaactcagtgatttaggttatcgtgtgtccgccaagaaagctcagatttgtcgccgcgaagtgacatacttaggctattcattgcgtgatggtcaacgttggcttactgaggcgcgcaagcgtaccgtcgttcaaatccccgcccctaagaccgcgaaacagatgcgtgaatttcttggcacgggtggtttctgccgtttgtggattcctggctcggctacgttagcggcacccctctatccactcacgaaagagaaaggagaattctcttgggccccagaacatcagaaagcgtttgacgccatcaagaaagcgttattaagcgctcctgctcttgcattgcccgatgtcaccaaaccattcacgctctacgtggatgaacgcaaaggcgtagcccgcggtgtgttgacacagaccttaggaccttggcgtcgtcccgtggcctacctctcgaagaaacttgacccagttgcaagtggttggcctgtctgcttgaaagctattgccgcagttgcaatcctcgtcaaagatgccgacaaacttactttgggccagaacctgactgttattgcaccacacgcccttgaaaacatcgttcgtcagccacctgatcgctggatgaccaatgctcgcatgacgcattatcagagcctcttgcttaccgaacgcgtgacttttgctccacctgcagccttaaaccccgcaacccttttacccgaagaaacagatgagcctgtgacgcatgactgtcatcagctcttgattgaagaaactggcgtacgcaaggacctcaccgatattccattaacaggtgaggtacttacgtggtttaccgaggggtcctcttatgtcgtcgaaggcaaacgtatggctggtgccgccgttgttgatggcacccgtactatctgggcaagcagcttacccgaaggcacgagtgctcagaaagcagagttgatggccttgacccaagccttacgccttgctgaagggaaatcgatcaatatttacaccgattcacgctatgcattcgccacggcacatgtacacggtgccatctacaaacaacgtggtttgttaacttctgctggccgcgagattaagaacaaagaagaaatcctttccttacttgaagccttacacctccccaaacgtctcgctattattcattgtccagggcatcagaaagcaaaagatcctatcagccgtgggaatcaaatggcagatcgtgtcgctaaacaggcagcccaaggcgttaacttgttgcccatgattgagacccctaaagctcca

SEQ ID NO: 514 - protein, 687 aa, synthetic construct
  REGION 1..687: note = Engineered reverse transcriptase variants
MHHHHHHGGSGVLTLQLDDEYRLYSPLVKPDQNIQFWLEQFPQAWAETGGMGLAKQVPPQVIQLKASATPVMVPQYPLSKEAAEGIRPHVQRLIQQGILVPVQSPWNTPLLPVRKPGTNDYRPVQDLREVNKRVQDIHPTVPNPYNLLCALPPQRSWYTVLDLKDAFFCLRLHPTSQPLFAFEWRDPDTGRTGQLTWTRLPQGFKNSPTIFDEALHRDLANFRIQHPQVTLLQYVDDLLLAGATKQDCLEGTKALLLELSDLGYRVSAKKAQICRREVTYLGYSLRDGQRWLTEARKRTVVQIPAPKTAKQMREFLGTGGFCRLWIPGSATLAAPLYPLTKEKGEFSWAPEHQKAFDAIKKALLSAPALALPDVTKPFTLYVDERKGVARGVLTQTLGPWRRPVAYLSKKLDPVASGWPVCLKAIAAVAILVKDADKLTLGQNLTVIAPHALENIVRQPPDRWMTNARMTHYQSLLLTERVTFAPPAALNPATLLPEETDEPVTHDCHQLLIEETGVRKDLTDIPLTGEVLTWFTEGSSYVVEGKRMAGAAVVDGTRTIWASSLPEGTSAQKAELMALTQALRLAEGKSINIYTDSRYAFATAHVHGAIYKQRGLLTSAGREIKNKEEILSLLEALHLPKRLAIIHCPGHQKAKDPISRGNQMADRVAKQAAQGVNLLPMIETPKAP

SEQ ID NO: 515 - DNA, 2061 bp, synthetic construct
  misc_feature 1..2061: note = Engineered reverse transcriptase variants
  source 1..2061: mol_type = other DNA
atgcatcaccatcaccatcatggtggtagcggagtgctgacccttcagctggatgatgaatatcgcttgtacagtccgctggtcaaaccagaccaaaacattcagttctggctcgaacagtttccgcaagcgtgggctgaaactggtggcatgggcctggccaaacaggttcctcctcaggtaatccagttaaaggcatctgccacgccggtgatggttcctcagtatccgctgtcgaaagaagcggcaaacgggattcgcccacacgtgcagcgtttgatccagcagggcattctggtaccggttcaaagcccctggaataccccgcttttaccagtccgcaaaccgggtacaaacgattaccgtcctgtgcaagacctgcgcgaagtcaataaacgtgttcaggatatccacccaaccgttccgaacccgtataatctgttgtgcgcgttaccgccgcagcgttcctggtacacggtgctggacctgaaggacgcgttcttctgtcttcgcctccatcccaccagccagccactgtttgcctttgaatggcgcgatcctgatacgggccgtactgggcaattaacgtggacccgtttgccgcagggctttaagaacagtcccacgatctttgatgaggctcttcaccgcgacctcgcaaatttccgcatccaacacccacaggtaacgttactccagtatgtcgatgatcttttgttagcgggtgccaccaaacaggactgcttggaaggaacgaaagcacttctcttggaactcagtgatttaggttatcgtgtgtccgccaagaaagctcagatttgtcgccgcgaagtgacatacttaggctattcattgcgtgatggtcaacgttggcttactgaggcgcgcaagcgtaccgtcgttcaaatccccgcccctaagaccgcgaaacaaatgcgtgaatttcttggcacggcaggtttctgccgtttgtggattcctggcttcgctacgttagcggcacccctctatccactcacgaaagagaaaggagaattctcttgggccccagaacatcagaaagcgtttgacgccatcaagaaagcgttattaagcgctcctgctcttgcattgcccgatgtcaccaaaccattcacgctctacgtggatgaacgcaaaggcgtagcccgcggtgtgttgacacagaccttaggaccttggcgtcgtcccgtggcctacctctcgaagaaacttgacccagttgcaagtggttggcctgtctgcttgaaagctattgccgcagttgcaatcctcgtcaaagatgccgacaaacttactttgggccagaacattactgttattgcaccacacgcccttgaaaacatcgttcgtcagccacctgatcgctggatgaccaatgctcgcatgacgcattatcagagcctcttgcttaccgaacgcgtgacttttgctccacctgcagccttaaaccccgcaacccttttacccgaagaaacagatgagcctgtgacgcatgactgtcatgaactcttgattgaagaaactggcgtacgcaaggacctcaccgatattccattaacaggtgaggtacttacgtggtttaccgaggggtcctcttatgtcgtcgaaggcaaacgtatggctggtgccgccgttgttgatggcacccgtactatctgggcaagcagcttacccgaaggcacgagtgctcagaaagcagaattgatggccttgacccaagccttacgccttgctgaagggaaatcgatcaatatttacaccgattcacgctatgcattcgccacggcacatgtacacggtgccatctacaaacaacgtggtttgttaacttctgctggccgcgagattaagaacaaagaagaaatcctttccttacttgaagccttacacctccccaaacgtctcgctattattcattgtccagggcatcagaaagcaaaagatcctatcagccgtgggaatcaaatggcagatcgtgtcgctaaacaggcagcccaaggcgttaacttgttgcccatgattgagacccctaaagctcca

SEQ ID NO: 516 - protein, 687 aa, synthetic construct
  REGION 1..687: note = Engineered reverse transcriptase variants
MHHHHHHGGSGVLTLQLDDEYRLYSPLVKPDQNIQFWLEQFPQAWAETGGMGLAKQVPPQVIQLKASATPVMVPQYPLSKEAANGIRPHVQRLIQQGILVPVQSPWNTPLLPVRKPGTNDYRPVQDLREVNKRVQDIHPTVPNPYNLLCALPPQRSWYTVLDLKDAFFCLRLHPTSQPLFAFEWRDPDTGRTGQLTWTRLPQGFKNSPTIFDEALHRDLANFRIQHPQVTLLQYVDDLLLAGATKQDCLEGTKALLLELSDLGYRVSAKKAQICRREVTYLGYSLRDGQRWLTEARKRTVVQIPAPKTAKQMREFLGTAGFCRLWIPGFATLAAPLYPLTKEKGEFSWAPEHQKAFDAIKKALLSAPALALPDVTKPFTLYVDERKGVARGVLTQTLGPWRRPVAYLSKKLDPVASGWPVCLKAIAAVAILVKDADKLTLGQNITVIAPHALENIVRQPPDRWMTNARMTHYQSLLLTERVTFAPPAALNPATLLPEETDEPVTHDCHELLIEETGVRKDLTDIPLTGEVLTWFTEGSSYVVEGKRMAGAAVVDGTRTIWASSLPEGTSAQKAELMALTQALRLAEGKSINIYTDSRYAFATAHVHGAIYKQRGLLTSAGREIKNKEEILSLLEALHLPKRLAIIHCPGHQKAKDPISRGNQMADRVAKQAAQGVNLLPMIETPKAP

SEQ ID NO: 517 - DNA, 2061 bp, synthetic construct
  misc_feature 1..2061: note = Engineered reverse transcriptase variants
  source 1..2061: mol_type = other DNA
atgcatcaccatcaccatcatggtggtagcggagtgctgacccttcagctggatgatgaatatcgcttgtacagtccgctggtcaaaccagaccaaaacattcagttctggctcgaacagtttccgcaagcgtgggctgaaactggtggcatgggcctggccaaacaggttcctcctcaggtaatccagttaaaggcatctgccacgccggtgatggttcctcagtatccgctgtcgaaagaagcggcagaggggattcgcccacacgtgcagcgtttgatccagcagggcattctggtaccggttcaaagcccctggaataccccgcttttaccagtccgcaaaccgggtacaaacgattaccgtcctgtgcaagacctgcgcgaagtcaataaacgttttcaggatatccacccaaccgttccgaacccgtataatctgttgtgcgcgttaccgccgcagcgttcctggtacacggtgctggacctgaaggacgcgttcttctgtcttcgcctccatcccaccagccagccactgtttgcctttgaatggcgcgatcctgatacgggccgtactgggcaattatgttggacccgtttgccgcagggctttaagaacagtcccacgatctttgatgaggctcttcaccgcgacctcgcaaatttccgcatccaacacccacaggtaacgttactccagtatgtcgatgatcttttgttagcgggtgccaccaaacaggactgcttggaaggaacgaaagcacttctcttggaactcagtgatttaggttatcgtgtgtccgccaagaaagctcagatttgtcgccgcgaagtgacatacttaggctattcattgcgtgatggtcaacgttggcttactcaggcgcgcaagaagaccgtcgttcaaatccccgcccctaagaccgcgaaacagatgcgtgaatttcttggcacggcaggtttctgccgtttgtggattcctggctttgctacgttagcggcacccctctatccactcacgaaagagaaaggagaattctcttgggccccagaacatcagaaagcgtttgacgccatcaagaaagcgttattaagcgctcctgctcttgcattgcccgatgtcaccaaaccattcacgctctacgtggatgaacgcaaaggcgtagcccgcggtgtgttgacacagaccttaggaccttggcgtcgtcccgtggcctacctctcgaagaaacttgacccagttgcaagtggttggcctgtctgcttgaaagctattgccgcagttgcaatcctcgtcaaagatgccgacaaacttactttgggccagaacctgactgttattgcaccacacgcccttgaaaacatcgttcgtcagccacctgatcgctggatgaccaatgctcgcatgacgcattatcagagcctcttgcttaccgaacgcgtgacttttgctccacctgcagccttaaaccccgcaacccttttacccgaagaaacagatgagcctgtgacgcatgactgtcatgagctcttgattgaagaaactggcgtacgcaaggacctcaccgatattccattaacaggtgaggtacttacgtggtttaccgaggggtcctcttatgtcgtcgaaggcaaacgtatggcgggtgccgccgttgttgatggcacccgtactatctgggcaagcagcttacccgaaggcacgagtgctcagaaagcagaattgatggccttgacccaagccttacgccttgctgaagggaaatcgatcaatatttacaccgattcacgctatgcattcgccacggcacatgtacacggtgccatctacaaacaacgtggtttgttaacttctgctggccgcgagattaagaacaaagaagaaatcctttccttacttgaagccttacacctccccaaacgtctcgctattattcattgtccagggcatcagaaagcaaaagatcctatcagccgtgggaatcaaatggcagatcgtgtcgctaaacaggcagcccaaggcgttaacttgttgcccatgattgagacccctaaagctcca

SEQ ID NO: 518 - protein, 687 aa, synthetic construct
  REGION 1..687: note = Engineered reverse transcriptase variants
MHHHHHHGGSGVLTLQLDDEYRLYSPLVKPDQNIQFWLEQFPQAWAETGGMGLAKQVPPQVIQLKASATPVMVPQYPLSKEAAEGIRPHVQRLIQQGILVPVQSPWNTPLLPVRKPGTNDYRPVQDLREVNKRFQDIHPTVPNPYNLLCALPPQRSWYTVLDLKDAFFCLRLHPTSQPLFAFEWRDPDTGRTGQLCWTRLPQGFKNSPTIFDEALHRDLANFRIQHPQVTLLQYVDDLLLAGATKQDCLEGTKALLLELSDLGYRVSAKKAQICRREVTYLGYSLRDGQRWLTQARKKTVVQIPAPKTAKQMREFLGTAGFCRLWIPGFATLAAPLYPLTKEKGEFSWAPEHQKAFDAIKKALLSAPALALPDVTKPFTLYVDERKGVARGVLTQTLGPWRRPVAYLSKKLDPVASGWPVCLKAIAAVAILVKDADKLTLGQNLTVIAPHALENIVRQPPDRWMTNARMTHYQSLLLTERVTFAPPAALNPATLLPEETDEPVTHDCHELLIEETGVRKDLTDIPLTGEVLTWFTEGSSYVVEGKRMAGAAVVDGTRTIWASSLPEGTSAQKAELMALTQALRLAEGKSINIYTDSRYAFATAHVHGAIYKQRGLLTSAGREIKNKEEILSLLEALHLPKRLAIIHCPGHQKAKDPISRGNQMADRVAKQAAQGVNLLPMIETPKAP

SEQ ID NO: 519 - DNA, 2061 bp, synthetic construct
  misc_feature 1..2061: note = Engineered reverse transcriptase variants
  source 1..2061: mol_type = other DNA
atgcatcaccatcaccatcatggtggtagcggagtgctgacccttcagctggatgatgaatatcgcttgtacagtccgctggtcaaaccagaccaaaacattcagttctggctcgaacagtttccgcaagcgtgggctgaaactggtggcatgggcctggccaaacaggttcctcctcaggtaatccagttaaaggcatctgccacgccggtgatggttcctcagtatccgctgtcgaaagaagcgcaagaggggattcgcccacacgtgcagcgtttgatccagcagggcattctggtaccggttcaaagcccctggaataccccgcttttaccagtccgcaaaccgggtacaaacgattaccgtcctgtgcaagacctgcgcgaagtcaataaacgtgttcaggatatccacccaaccgttccgaacccgtataatctgttgtgcgcgttaccgccgcagcgttcctggtacacggtgctggacctgaaggacgcgttcttctgtcttcgcctccatcccaccagccagccactgtttgcctttgaatggcgcgatcctgatacgggccgtactgggcaattaacatggacccgtttgccgcagggctttaagaacagtcccacgatctttgatgaggctcttcaccgcgacctcgcaaatttccgcatccaacacccacaggtaacgttactccagtatgtcgatgatcttttgttagcgggtgccaccaaacaggactgcttggaaggaacgaaagcacttctcttggaactcagtgatttaggttatcgtgtgtccgccaagaaagctcagatttgtcgccgcgaagtgacatacttaggctattcattgcgtgatggtcaacgttggcttactgaggcgcgcaagaagaccgtcgttcaaatccccgcccctaagaccgcgaaacagatgcgtgaatttcttggcacggcaggtttctgccgtttgtggattcctggctttgctacgttagcggcacccctctatccactcacgaaagagaaaggagaattctcttgggccccagaacatcagaaagcgtttgacgccatcaagaaagcgttattaagcgctcctgctcttgcattgcccgatgtcaccaaaccattcacgctctacgtggatgaacgcaaaggcgtagcccgcggtgtgttgacacagaccttaggaccttggcgtcgtcccgtggcctacctctcgaagaaacttgacccagttgcaagtggttggcctgtctgcttgaaagctattgccgcagttgcaatcctcgtcaaagatgccgacaaacttactttgggccagaacctgactgttattgcaccacacgcccttgaaaacatcgttcgtcagccacctgatcgctggatgaccaatgctcgcatgacgcattatcagagcctcttgcttaccgaacgcgtgacttttgctccacctgcagccttaaaccccgcaacccttttacccgaagaaacagatgagcctgtgacgcatgactgtcatcagctcttgattgaagaaactggcgtacgcaaggacctcaccgatattccattaacaggtgaggtacttacgtggtttaccgaggggtcctcttatgtcgtcgaaggcaaacgtatggctggtgccgccgttgttgatggcacccgtactatctgggcaagcagcttacccgaaggcacgagtgctcagaaagcagaattgatggccttgacccaagccttacgccttgctgaagggaaatcgatcaatatttacaccgattcacgctatgcattcgccacggcacatgtacacggtgccatctacaaacaacgtggtttgttaacttctgctggccgcgagattaagaacaaagaagaaatcctttccttacttgaagccttacacctccccaaacgtctcgctattattcattgtccagggcatcagaaagcaaaagatcctatcagccgtgggaatcaaatggcagatcgtgtcgctaaacaggcagcccaaggcgttaacttgttgcccatgattgagacccctaaagctcca

SEQ ID NO: 520 - protein, 687 aa, synthetic construct
  REGION 1..687: note = Engineered reverse transcriptase variants
MHHHHHHGGSGVLTLQLDDEYRLYSPLVKPDQNIQFWLEQFPQAWAETGGMGLAKQVPPQVIQLKASATPVMVPQYPLSKEAQEGIRPHVQRLIQQGILVPVQSPWNTPLLPVRKPGTNDYRPVQDLREVNKRVQDIHPTVPNPYNLLCALPPQRSWYTVLDLKDAFFCLRLHPTSQPLFAFEWRDPDTGRTGQLTWTRLPQGFKNSPTIFDEALHRDLANFRIQHPQVTLLQYVDDLLLAGATKQDCLEGTKALLLELSDLGYRVSAKKAQICRREVTYLGYSLRDGQRWLTEARKKTVVQIPAPKTAKQMREFLGTAGFCRLWIPGFATLAAPLYPLTKEKGEFSWAPEHQKAFDAIKKALLSAPALALPDVTKPFTLYVDERKGVARGVLTQTLGPWRRPVAYLSKKLDPVASGWPVCLKAIAAVAILVKDADKLTLGQNLTVIAPHALENIVRQPPDRWMTNARMTHYQSLLLTERVTFAPPAALNPATLLPEETDEPVTHDCHQLLIEETGVRKDLTDIPLTGEVLTWFTEGSSYVVEGKRMAGAAVVDGTRTIWASSLPEGTSAQKAELMALTQALRLAEGKSINIYTDSRYAFATAHVHGAIYKQRGLLTSAGREIKNKEEILSLLEALHLPKRLAIIHCPGHQKAKDPISRGNQMADRVAKQAAQGVNLLPMIETPKAP

SEQ ID NO: 521 - DNA, 2061 bp, synthetic construct
  misc_feature 1..2061: note = Engineered reverse transcriptase variants
  source 1..2061: mol_type = other DNA
atgcatcaccatcaccatcatggtggtagcggagtgctgacccttcagctggatgatgaatatcgcttgtacagtccgctggtcaaaccagaccaaaacattcagttctggctcgaacagtttccgcaagcgtgggctgaaactggtggcatgggcctggccaaacaggttcctcctcaggtaatccagttaaaggcatctgccacgccggtgatggttcctcagtatccgctgtcgaaagaagcgcaagaggggattcgcccacacgtgcagactttgatccagcagggcattctggtaccggttcaaagcccctggaataccccgcttttaccagtccgcaaaccgggtacaaacgattaccgtcctgtgcaagacctgcgcgaagtcaataaacgtgtgcaggatatccacccaaccgttccgaacccgtataatctgttgtgcgcgttaccgccgcagcgttcctggtacacggtgctggacctgaaggacgcgttcttctgtcttcgcctccatcccaccagccagccactgtttgcctttgaatggcgcgatcctgatacgggccgtactgggcaattaacgtggacccgtttgccgcagggctttaagaacagtcccacgatctttgatgaggctcttcaccgcgacctcgcaaatttccgcatccaacacccacaggtaacgttactccagtatgtcgatgatcttttgttagcgggtgccaccaaacaggactgcttggaaggaacgaaagcacttctcttggaactcagtgatttaggttatcgtgtgtccgccaagaaagctcagatttgtcgccgcgaagtgacatacttaggctattcattgcgtgatggtcaacgttggcttactcaggcgcgcaagaagaccgtcgttcaaatccccgcccctaagaccgcgaaacagatgcgtgaatttcttggcacggcaggtttctgccgtttgtggattcctggctcggctacgttagcggcacccctctatccactcacgaaagagaaaggagaattctcttgggccccagaacatcagaaagcgtttgacgccatcaagaaagcgttattaagcgctcctgctcttgcattgcccgatgtcaccaaaccattcacgctctacgtggatgaacgcaaaggcgtagcccgcggtgtgttgacacagaccttaggaccttggcgtcgtcccgtggcctacctctcgaagaaacttgacccagttgcaagtggttggcctgtctgcttgaaagctattgccgcagttgcaatcctcgtcaaagatgccgacaaacttactttgggccagaacctgactgttattgcaccacacgcccttgaaaacatcgttcgtcagccacctgatcgctggatgaccaatgctcgcatgacgcattatcagagcctcttgcttaccgaacgcgtgacttttgctccacctgcagccttaaaccccgcaacccttttacccgaagaaacagatgagcctgtgacgcatgactgtcatgagctcttgattgaagaaactggcgtacgcaaggacctcaccgatattccattaacaggtgaggtacttacgtggtttaccgaggggtcctcttatgtcgtcgaaggcaaacgtatggctggtgccgccgttgttgatggcacccgtactatctgggcaagcagcttacccgaaggcacgagtgctcagaaagcagaattgatggccttgacccaagccttacgccttgctgaagggaaatcgatcaatatttacaccgattcacgctatgcattcgccacggcacatgtacacggtgccatctacaaacaacgtggtttgttaacttctgctggccgcgagattaagaacaaagaagaaatcctttccttacttgaagccttacacctccccaaacgtctcgctattattcattgtccagggcatcagaaagcaaaagatcctatcagccgtgggaatcaaatggcagatcgtgtcgctaaacaggcagcccaaggcgttaacttgttgcccatgattgagacccctaaagctcca

SEQ ID NO: 522 - protein, 687 aa, synthetic construct
  REGION 1..687: note = Engineered reverse transcriptase variants
MHHHHHHGGSGVLTLQLDDEYRLYSPLVKPDQNIQFWLEQFPQAWAETGGMGLAKQVPPQVIQLKASATPVMVPQYPLSKEAQEGIRPHVQTLIQQGILVPVQSPWNTPLLPVRKPGTNDYRPVQDLREVNKRVQDIHPTVPNPYNLLCALPPQRSWYTVLDLKDAFFCLRLHPTSQPLFAFEWRDPDTGRTGQLTWTRLPQGFKNSPTIFDEALHRDLANFRIQHPQVTLLQYVDDLLLAGATKQDCLEGTKALLLELSDLGYRVSAKKAQICRREVTYLGYSLRDGQRWLTQARKKTVVQIPAPKTAKQMREFLGTAGFCRLWIPGSATLAAPLYPLTKEKGEFSWAPEHQKAFDAIKKALLSAPALALPDVTKPFTLYVDERKGVARGVLTQTLGPWRRPVAYLSKKLDPVASGWPVCLKAIAAVAILVKDADKLTLGQNLTVIAPHALENIVRQPPDRWMTNARMTHYQSLLLTERVTFAPPAALNPATLLPEETDEPVTHDCHELLIEETGVRKDLTDIPLTGEVLTWFTEGSSYVVEGKRMAGAAVVDGTRTIWASSLPEGTSAQKAELMALTQALRLAEGKSINIYTDSRYAFATAHVHGAIYKQRGLLTSAGREIKNKEEILSLLEALHLPKRLAIIHCPGHQKAKDPISRGNQMADRVAKQAAQGVNLLPMIETPKAP

SEQ ID NO: 523 - DNA, 2061 bp, synthetic construct
  misc_feature 1..2061: note = Engineered reverse transcriptase variants
  source 1..2061: mol_type = other DNA
atgcatcaccatcaccatcatggtggtagcggagtgctgacccttcagctggatgatgaatatcgcttgtacagtccgctggtcaaaccagaccaaaacattcagttctggctcgaacagtttccgcaagcgtgggctgaaactggtggcatgggcctggccaaacaggttcctcctcaggtaatccagttaaaggcatctgccacgccggtgatggttcctcagtatccgctgtcgaaagaagcgcaagaggggattcgcccacacgtgcagactttgatccagcagggcattctggtaccggttcaaagcccctggaataccccgcttttaccagtccgcaaaccgggtacaaacgattaccgtcctgtgcaagacctgcgcgaagtcaataaacgtgttcaggatatccacccaaccgttccgaacccgtataatctgttgtgcgcgttaccgccgcagcgttcctggtacacggtgctggacctgaaggacgcgttcttctgtcttcgcctccatcccaccagccagccactgtttgcctttgaatggcgcgatcctgatacgggccgtactgggcaattaacgtggacccgtttgccgcagggctttaagaacagtcccacgatctttgatgaggctcttcaccgcgacctcgcaaatttccgcatccaacacccacaggtaacgttactccagtatgtcgatgatcttttgttagcgggtgccaccaaacaggactgcttggaaggaacgaaagcacttctcttggaactcagtgatttaggttatcgtgtgtccgccaagaaagctcagatttgtcgccgcgaagtgacatacttaggctattcattgcgtgatggtcaacgttggcttactgaggcgcgcaagaagaccgtcgttcaaatccccgcccctaagaccgcgaaacagatgcgtgaatttcttggcacggcaggtttctgccgtttgtggattcctggcttcgctacgttagcggcacccctctatccactcacgaaagagaaaggagaattctcttgggccccagaacatcagaaagcgtttgacgccatcaagaaagcgttattaagcgctcctgctcttgcattgcccgatgtcaccaaaccattcacgctctacgtggatgaacgcaaaggcgtagcccgcggtgtgttgacacagaccttaggaccttggcgtcgtcccgtggcctacctctcgaagaaacttgacccagttgcaagtggttggcctgtctgcttgaaagctattgccgcagttgcaatcctcgtcaaagatgccgacaaacttactttgggccagaacctgactgttattgcaccacacgcccttgaaaacatcgttcgtcagccacctgatcgctggatgaccaatgctcgcatgacgcattatcagagcctcttgcttaccgaacgcgtgacttttgctccacctgcagccttaaaccccgcaacccttttacccgaagaaacagatgagcctgtgacgcatgactgtcatgaactcttgattgaagaaactggcgtacgcaaggacctcaccgatattccattaacaggtgaggtacttacgtggtttaccgaggggtcctcttatgtcgtcgaaggcaaacgtatggctggtgccgccgttgttgatggcacccgtactatctgggcaagcagcttacccgaaggcacgagtgctcagaaagcagaattgatggccttgacccaagccttacgccttgctgaagggaaatcgatcaatatttacaccgattcacgctatgcattcgccacggcacatgtacacggtgccatctacaaacaacgtggtttgttaacttctgctggccgcgagattaagaacaaagaagaaatcctttccttacttgaagccttacacctccccaaacgtctcgctattattcattgtccagggcatcagaaagcaaaagatcctatcagccgtgggaatcaaatggcagatcgtgtcgctaaacaggcagcccaaggcgttaacttgttgcccatgattgagacccctaaagctcca

SEQ ID NO: 524 - protein, 687 aa, synthetic construct
  REGION 1..687: note = Engineered reverse transcriptase variants
MHHHHHHGGSGVLTLQLDDEYRLYSPLVKPDQNIQFWLEQFPQAWAETGGMGLAKQVPPQVIQLKASATPVMVPQYPLSKEAQEGIRPHVQTLIQQGILVPVQSPWNTPLLPVRKPGTNDYRPVQDLREVNKRVQDIHPTVPNPYNLLCALPPQRSWYTVLDLKDAFFCLRLHPTSQPLFAFEWRDPDTGRTGQLTWTRLPQGFKNSPTIFDEALHRDLANFRIQHPQVTLLQYVDDLLLAGATKQDCLEGTKALLLELSDLGYRVSAKKAQICRREVTYLGYSLRDGQRWLTEARKKTVVQIPAPKTAKQMREFLGTAGFCRLWIPGFATLAAPLYPLTKEKGEFSWAPEHQKAFDAIKKALLSAPALALPDVTKPFTLYVDERKGVARGVLTQTLGPWRRPVAYLSKKLDPVASGWPVCLKAIAAVAILVKDADKLTLGQNLTVIAPHALENIVRQPPDRWMTNARMTHYQSLLLTERVTFAPPAALNPATLLPEETDEPVTHDCHELLIEETGVRKDLTDIPLTGEVLTWFTEGSSYVVEGKRMAGAAVVDGTRTIWASSLPEGTSAQKAELMALTQALRLAEGKSINIYTDSRYAFATAHVHGAIYKQRGLLTSAGREIKNKEEILSLLEALHLPKRLAIIHCPGHQKAKDPISRGNQMADRVAKQAAQGVNLLPMIETPKAP

SEQ ID NO: 525 - DNA, 2061 bp, synthetic construct
  misc_feature 1..2061: note = Engineered reverse transcriptase variants
  source 1..2061: mol_type = other DNA
atgcatcaccatcaccatcatggtggtagcggagtgctgacccttcagctggatgatgaatatcgcttgtacagtccgctggtcaaaccagaccaaaacattcagttctggctcgaacagtttccgcaagcgtgggctgaaactggtggcatgggcctggccaaacaggttcctcctcaggtaatccagttaaaggcatctgccacgccggtgatggttcctcagtatccgctgtcgaaagaagcgcaagaggggattcgcccacacgtgcagactttgatccagcagggcattctggtaccggttcaaagcccctggaataccccgcttttaccagtccgcaaaccgggtacaaacgattaccgtcctgtgcaagacctgcgcgaagtcaataaacgtccacaggatatccacccaaccgttccgaacccgtataatctgttgtgcgcgttaccgccgcagcgttcctggtacacggtgctggacctgaaggacgcgttcttctgtcttcgcctccatcccaccagccagccactgtttgcctttgaatggcgcgatcctgatacgggccgtactgggcaattaacgtggacccgtttgccgcagggctttaagaacagtcccacgatctttgatgaggctcttcaccgcgacctcgcaaatttccgcatccaacacccacaggtaacgttactccagtatgtcgatgatcttttgttagcgggtgccaccaaacaggactgcttggaaggaacgaaagcacttctcttggaactcagtgatttaggttatcgtgtgtccgccaagaaagctcagatttgtcgccgcgaagtgacatacttaggctattcattgcgtgatggtcaacgttggcttactgaggcgcgcaagaagaccgtcgttcaaatccccgcccctaagaccgcgaaacagatgcgtgaatttcttggcacggcaggtttctgccgtttgtggattcctggctttgctacgttagcggcacccctctatccactcacgaaagaggccggagaattctcttgggccccagaacatcagaaagcgtttgacgccatcaagaaagcgttattaagcgctcctgctcttgcattgcccgatgtcaccaaaccattcacgctctacgtggatgaacgcaaaggcgtagcccgcggtgtgttgacacagaccttaggaccttggcgtcgtcccgtggcctacctctcgaagaaacttgacccagttgcaagtggttggcctgtctgcttgaaagctattgccgcagttgcaatcctcgtcaaagatgccgacaaacttactttgggccagaacattactgttattgcaccacacgcccttgaaaacatcgttcgtcagccacctgatcgctggatgaccaatgctcgcatgacgcattatcagagcctcttgcttaccgaacgcgtgacttttgctccacctgcagccttaaaccccgcaacccttttacccgaagaaacagatgagcctgtgacgcatgactgtcatgagctcttgattgaagaaactggcgtacgcaaggacctcaccgatattccattaacaggtgaggtacttacgtggtttaccgaggggtcctcttatgtcgtcgaaggcaaacgtatggctggtgccgccgttgttgatggcacccgtactatctgggcaagcagcttacccgaaggcacgagtgctcagaaagcagagttgatggccttgacccaagccttacgccttgctgaagggaaatcgatcaatatttacaccgattcacgctatgcattcgccacggcacatgtacacggtgccatctacaaacaacgtggtttgttaacttctgctggccgcgagattaagaacaaagaagaaatcctttccttacttgaagccttacacctccccaaacgtctcgctattattcattgtccagggcatcagaaagcaaaagatcctatcagccgtgggaatcaaatggcagatcgtgtcgctaaacaggcagcccaaggcgttaacttgttgcccatgattgagacccctaaagctcca

SEQ ID NO: 526 - protein, 687 aa, synthetic construct
  REGION 1..687: note = Engineered reverse transcriptase variants
MHHHHHHGGSGVLTLQLDDEYRLYSPLVKPDQNIQFWLEQFPQAWAETGGMGLAKQVPPQVIQLKASATPVMVPQYPLSKEAQEGIRPHVQTLIQQGILVPVQSPWNTPLLPVRKPGTNDYRPVQDLREVNKRPQDIHPTVPNPYNLLCALPPQRSWYTVLDLKDAFFCLRLHPTSQPLFAFEWRDPDTGRTGQLTWTRLPQGFKNSPTIFDEALHRDLANFRIQHPQVTLLQYVDDLLLAGATKQDCLEGTKALLLELSDLGYRVSAKKAQICRREVTYLGYSLRDGQRWLTEARKKTVVQIPAPKTAKQMREFLGTAGFCRLWIPGFATLAAPLYPLTKEAGEFSWAPEHQKAFDAIKKALLSAPALALPDVTKPFTLYVDERKGVARGVLTQTLGPWRRPVAYLSKKLDPVASGWPVCLKAIAAVAILVKDADKLTLGQNITVIAPHALENIVRQPPDRWMTNARMTHYQSLLLTERVTFAPPAALNPATLLPEETDEPVTHDCHELLIEETGVRKDLTDIPLTGEVLTWFTEGSSYVVEGKRMAGAAVVDGTRTIWASSLPEGTSAQKAELMALTQALRLAEGKSINIYTDSRYAFATAHVHGAIYKQRGLLTSAGREIKNKEEILSLLEALHLPKRLAIIHCPGHQKAKDPISRGNQMADRVAKQAAQGVNLLPMIETPKAP

SEQ ID NO: 527 - DNA, 2061 bp, synthetic construct
  misc_feature 1..2061: note = Engineered reverse transcriptase variants
  source 1..2061: mol_type = other DNA
atgcatcaccatcaccatcatggtggtagcggagtgctgacccttcagctggatgatgaatatcgcttgtacagtccgctggtcaaaccagaccaaaacattcagttctggctcgaacagtttccgcaagcgtgggctgaaactggtggcatgggcctggccaaacaggttcctcctcaggtaatccagttaaaggcatctgccacgccggtgatggttcctcagtatccgctgtcgaaagaagcgcaagaggggattcgcccacacgtgcagcgtttgatccagcagggcattctggtaccggttcaaagcccctggaataccccgcttttaccagtccgcaaaccgggtacaaacgattaccgtcctgtgcaagacctgcgcgaagtcaataaacgttttcaggatatccacccaaccgttccgaacccgtataatctgttgtgcgcgttaccgccgcagcgttcctggtacacggtgctggacctgaaggacgcgttcttctgtcttcgcctccatcccaccagccagccactgtttgcctttgaatggcgcgatcctgatacgggccgtactgggcaattatgttggacccgtttgccgcagggctttaagaacagtcccacgatctttgatgaggctcttcaccgcgacctcgcaaatttccgcatccaacacccacaggtaacgttactccagtatgtcgatgatcttttgttagcgggtgccaccaaacaggactgcttggaaggaacgaaagcacttctcttggaactcagtgatttaggttatcgtgtgtccgccaagaaagctcagatttgtcgccgcgaagtgacatacttaggctattcattgcgtgatggtcaacgttggcttactgaggcgcgcaagaagaccgtcgttcaaatccccgcccctaagaccgcgaaacagatgcgtgaatttcttggcacgggtggtttctgccgtttgtggattcctggctcggctacgttagcggcacccctctatccactcacgaaagagaaaggagaattctcttgggccccagaacatcagaaagcgtttgacgccatcaagaaagcgttattaagcgctcctgctcttgcattgcccgatgtcaccaaaccattcacgctctacgtggatgaacgcaaaggcgtagcccgcggtgtgttgacacagaccttaggaccttggcgtcgtcccgtggcctacctctcgaagaaacttgacccagttgcaagtggttggcctgtctgcttgaaagctattgccgcagttgcaatcctcgtcaaagatgccgacaaacttactttgggccagaacctgactgttattgcaccacacgcccttgaaaacatcgttcgtcagccacctgatcgctggatgaccaatgctcgcatgacgcattatcagagcctcttgcttaccgaacgcgtgacttttgctccacctgcagccttaaaccccgcaacccttttacccgaagaaacagatgagcctgtgacgcatgactgtcatcagctcttgattgaagaaactggcgtacgcaaggacctcaccgatattccattaacaggtgaggtacttacgtggtttaccgaggggtcctcttatgtcgtcgaaggcaaacgtatggctggtgccgccgttgttgatggcacccgtactatctgggcaagcagcttacccgaaggcacgagtgctcagaaagcagagttgatggccttgacccaagccttacgccttgctgaagggaaatcgatcaatatttacaccgattcacgctatgcattcgccacggcacatgtacacggtgccatctacaaacaacgtggtttgttaacttctgctggccgcgagattaagaacaaagaagaaatcctttccttacttgaagccttacacctccccaaacgtctcgctattattcattgtccagggcatcagaaagcaaaagatcctatcagccgtgggaatcaaatggcagatcgtgtcgctaaacaggcagcccaaggcgttaacttgttgcccatgattgagacccctaaagctcca

SEQ ID NO: 528 - protein, 687 aa, synthetic construct
  REGION 1..687: note = Engineered reverse transcriptase variants
MHHHHHHGGSGVLTLQLDDEYRLYSPLVKPDQNIQFWLEQFPQAWAETGGMGLAKQVPPQVIQLKASATPVMVPQYPLSKEAQEGIRPHVQRLIQQGILVPVQSPWNTPLLPVRKPGTNDYRPVQDLREVNKRFQDIHPTVPNPYNLLCALPPQRSWYTVLDLKDAFFCLRLHPTSQPLFAFEWRDPDTGRTGQLCWTRLPQGFKNSPTIFDEALHRDLANFRIQHPQVTLLQYVDDLLLAGATKQDCLEGTKALLLELSDLGYRVSAKKAQICRREVTYLGYSLRDGQRWLTEARKKTVVQIPAPKTAKQMREFLGTGGFCRLWIPGSATLAAPLYPLTKEKGEFSWAPEHQKAFDAIKKALLSAPALALPDVTKPFTLYVDERKGVARGVLTQTLGPWRRPVAYLSKKLDPVASGWPVCLKAIAAVAILVKDADKLTLGQNLTVIAPHALENIVRQPPDRWMTNARMTHYQSLLLTERVTFAPPAALNPATLLPEETDEPVTHDCHQLLIEETGVRKDLTDIPLTGEVLTWFTEGSSYVVEGKRMAGAAVVDGTRTIWASSLPEGTSAQKAELMALTQALRLAEGKSINIYTDSRYAFATAHVHGAIYKQRGLLTSAGREIKNKEEILSLLEALHLPKRLAIIHCPGHQKAKDPISRGNQMADRVAKQAAQGVNLLPMIETPKAP

SEQ ID NO: 529 - DNA, 2061 bp, synthetic construct
  misc_feature 1..2061: note = Engineered reverse transcriptase variants
  source 1..2061: mol_type = other DNA
atgcatcaccatcaccatcatggtggtagcggagtgctgacccttcagctggatgatgaatatcgcttgtacagtccgctggtcaaaccagaccaaaacattcagttctggctcgaacagtttccgcaagcgtgggctgaaactggtggcatgggcctggccaaacaggttcctcctcaggtaatccagttaaaggcatctgccacgccggtgatggttcgtcagtatccgctgtcgaaagaagcgcaagaggggattcgcccacacgtgcagcgtttgatccagcagggcattctggtaccggttcaaagcccctggaataccccgcttttaccagtccgcaaaccgggtacaaacgattaccgtcctgtgcaagacctgcgcgaagtcaataaacgtgtgcaggatatccacccaaccgttccgaacccgtataatctgttgtgcgcgttaccgccgcagcgttcctggtacacggtgctggacctgaaggacgcgttcttctgtcttcgcctccatcccaccagccagccactgtttgcctttgaatggcgcgatcctgatacgggccgtactgggcaattatgttggacccgtttgccgcagggctttaagaacagtcccacgatctttgatgaggctcttcaccgcgacctcgcaaatttccgcatccaacacccacaggtaacgttactccagtatgtcgatgatcttttgttagcgggtgccaccaaacaggactgcttggaaggaacgaaagcacttctcttggaactcagtgatttaggttatcgtgtgtccgccaagaaagctcagatttgtcgccgcgaagtgacatacttaggctattcattgcgtgatggtcaacgttggcttactgaggcgcgcaagcgtaccgtcgttcaaatccccgcccctaagaccgcgaaagcaatgcgtgaatttcttggcacggcaggtttctgccgtttgtggattcctggctcggctacgttagcggcacccctctatccactcacgaaagagaaaggagaattctcttgggccccagaacatcagaaagcgtttgacgccatcaagaaagcgttattaagcgctcctgctcttgcattgcccgatgtcaccaaaccattcacgctctacgtggatgaacgcaaaggcgtagcccgcggtgtgttgacacagaccttaggaccttggcgtcgtcccgtggcctacctctcgaagaaacttgacccagttgcaagtggttggcctgtctgcttgaaagctattgccgcagttgcaatcctcgtcaaagatgccgacaaacttactttgggccagaacctgactgttattgcaccacacgcccttgaaaacatcgttcgtcagccacctgatcgctggatgaccaatgctcgcatgacgcattatcagagcctcttgcttaccgaacgcgtgacttttgctccacctgcagccttaaaccccgcaacccttttacccgaagaaacagatgagcctgtgacgcatgactgtcatgagctcttgattgaagaaactggcgtacgcaaggacctcaccgatattccattaacaggtgaggtacttacgtggtttaccgaggggtcctcttatgtcgtcgaaggcaaacgtatggctggtgccgccgttgttgatggcacccgtactatctgggcaagcagcttacccgaaggcacgagtgctcagaaagcacaattgatggccttgacccaagccttacgccttgctgaagggaaatcgatcaatatttacaccgattcacgctatgcattcgccacggcacatgtacacggtgccatctacaaacaacgtggtttgttaacttctgctggccgcgagattaagaacaaagaagaaatcctttccttacttgaagccttacacctccccaaacgtctcgctattattcattgtccagggcatcagaaagcaaaagatcctatcagccgtgggaatcaaatggcagatcgtgtcgctaaacaggcagcccaaggcgttaacttgttgcccatgattgagacccctaaagctcca

SEQ ID NO: 530 - protein, 687 aa, synthetic construct
  REGION 1..687: note = Engineered reverse transcriptase variants
MHHHHHHGGSGVLTLQLDDEYRLYSPLVKPDQNIQFWLEQFPQAWAETGGMGLAKQVPPQVIQLKASATPVMVRQYPLSKEAQEGIRPHVQRLIQQGILVPVQSPWNTPLLPVRKPGTNDYRPVQDLREVNKRVQDIHPTVPNPYNLLCALPPQRSWYTVLDLKDAFFCLRLHPTSQPLFAFEWRDPDTGRTGQLCWTRLPQGFKNSPTIFDEALHRDLANFRIQHPQVTLLQYVDDLLLAGATKQDCLEGTKALLLELSDLGYRVSAKKAQICRREVTYLGYSLRDGQRWLTEARKRTVVQIPAPKTAKAMREFLGTAGFCRLWIPGSATLAAPLYPLTKEKGEFSWAPEHQKAFDAIKKALLSAPALALPDVTKPFTLYVDERKGVARGVLTQTLGPWRRPVAYLSKKLDPVASGWPVCLKAIAAVAILVKDADKLTLGQNLTVIAPHALENIVRQPPDRWMTNARMTHYQSLLLTERVTFAPPAALNPATLLPEETDEPVTHDCHELLIEETGVRKDLTDIPLTGEVLTWFTEGSSYVVEGKRMAGAAVVDGTRTIWASSLPEGTSAQKAQLMALTQALRLAEGKSINIYTDSRYAFATAHVHGAIYKQRGLLTSAGREIKNKEEILSLLEALHLPKRLAIIHCPGHQKAKDPISRGNQMADRVAKQAAQGVNLLPMIETPKAP

SEQ ID NO: 531 - DNA, 2061 bp, synthetic construct
  misc_feature 1..2061: note = Engineered reverse transcriptase variants
  source 1..2061: mol_type = other DNA
atgcatcaccatcaccatcatggtggtagcggagtgctgacccttcagctggatgatgaatatcgcttgtacagtccgctggtcaaaccagaccaaaacattcagttctggctcgaacagtttccgcaagcgtgggctgaaactggtggcatgggcctggccaaacaggttcctcctcaggtaatccagttaaaggcatctgccacgccggtgatggttcgtcagtatccgctgtcgaaagaagcgcaagaggggattcgcccacacgtgcagcgtttgatccagcagggcattctggtaccggttcaaagcccctggaataccccgcttttaccagtccgcaaaccgggtacaaacgattaccgtcctgtgcaagacctgcgcgaagtcaataaacgtccacaggatatccacccaaccgttccgaacccgtataatctgttgtgcgcgttaccgccgcagcgttcctggtacacggtgctggacctgaaggacgcgttcttctgtcttcgcctccatcccaccagccagccactgtttgcctttgaatggcgcgatcctgatacgggccgtactgggcaattatgttggacccgtttgccgcagggctttaagaacagtcccacgatctttgatgaggctcttcaccgcgacctcgcaaatttccgcatccaacacccacaggtaacgttactccagtatgtcgatgatcttttgttagcgggtgccaccaaacaggactgcttggaaggaacgaaagcacttctcttggaactcagtgatttaggttatcgtgtgtccgccaagaaagctcagatttgtcgccgcgaagtgacatacttaggctattcattgcgtgatggtcaacgttggcttactgaggcgcgcaagaagaccgtcgttcaaatccccgcccctaagaccgcgaaacagatgcgtgaatttcttggcacggcaggtttctgccgtttgtggattcctggctttgctacgttagcggcacccctctatccactcacgaaagagaaaggagaattctcttgggccccagaacatcagaaagcgtttgacgccatcaagaaagcgttattaagcgctcctgctcttgcattgcccgatgtcaccaaaccattcacgctctacgtggatgaacgcaaaggcgtagcccgcggtgtgttgacacagaccttaggaccttggcgtcgtcccgtggcctacctctcgaagaaacttgacccagttgcaagtggttggcctgtctgcttgaaagctattgccgcagttgcaatcctcgtcaaagatgccgacaaacttactttgggccagaacctgactgttattgcaccacacgcccttgaaaacatcgttcgtcagccacctgatcgctggatgaccaatgctcgcatgacgcattatcagagcctcttgcttaccgaacgcgtgacttttgctccacctgcagccttaaaccccgcaacccttttacccgaagaaacagatgagcctgtgacgcatgactgtcatgaactcttgattgaagaaactggcgtacgcaaggacctcaccgatattccattaacaggtgaggtacttacgtggtttaccgaggggtcctcttatgtcgtcgaaggcaaacgtatggctggtgccgccgttgttgatggcacccgtactatctgggcaagcagcttacccgaaggcacgagtgctcagaaagcagagttgatggccttgacccaagccttacgccttgctgaagggaaatcgatcaatatttacaccgattcacgctatgcattcgccacggcacatgtacacggtgccatctacaaacaacgtggtttgttaacttctgctggccgcgagattaagaacaaagaagaaatcctttccttacttgaagccttacacctccccaaacgtctcgctattattcattgtccagggcatcagaaagcaaaagatcctatcagccgtgggaatcaaatggcagatcgtgtcgctaaacaggcagcccaaggcgttaacttgttgcccatgattgagacccctaaagctcca

SEQ ID NO: 532 - protein, 687 aa, synthetic construct
  REGION 1..687: note = Engineered reverse transcriptase variants
MHHHHHHGGSGVLTLQLDDEYRLYSPLVKPDQNIQFWLEQFPQAWAETGGMGLAKQVPPQVIQLKASATPVMVRQYPLSKEAQEGIRPHVQRLIQQGILVPVQSPWNTPLLPVRKPGTNDYRPVQDLREVNKRPQDIHPTVPNPYNLLCALPPQRSWYTVLDLKDAFFCLRLHPTSQPLFAFEWRDPDTGRTGQLCWTRLPQGFKNSPTIFDEALHRDLANFRIQHPQVTLLQYVDDLLLAGATKQDCLEGTKALLLELSDLGYRVSAKKAQICRREVTYLGYSLRDGQRWLTEARKKTVVQIPAPKTAKQMREFLGTAGFCRLWIPGFATLAAPLYPLTKEKGEFSWAPEHQKAFDAIKKALLSAPALALPDVTKPFTLYVDERKGVARGVLTQTLGPWRRPVAYLSKKLDPVASGWPVCLKAIAAVAILVKDADKLTLGQNLTVIAPHALENIVRQPPDRWMTNARMTHYQSLLLTERVTFAPPAALNPATLLPEETDEPVTHDCHELLIEETGVRKDLTDIPLTGEVLTWFTEGSSYVVEGKRMAGAAVVDGTRTIWASSLPEGTSAQKAELMALTQALRLAEGKSINIYTDSRYAFATAHVHGAIYKQRGLLTSAGREIKNKEEILSLLEALHLPKRLAIIHCPGHQKAKDPISRGNQMADRVAKQAAQGVNLLPMIETPKAP

SEQ ID NO: 533 - DNA, 2061 bp, synthetic construct
  misc_feature 1..2061: note = Engineered reverse transcriptase variants
  source 1..2061: mol_type = other DNA
atgcatcaccatcaccatcatggtggtagcggagtgctgacccttcagctggatgatgaatatcgcttgtacagtccgctggtcaaaccagaccaaaacattcagttctggctcgaacagtttccgcaagcgtgggctgaaactggtggcatgggcctggccaaacaggttcctcctcaggtaatccagttaaaggcatctgccacgccggtgtcagttcgtcagtatccgctgtcgaaagaagcgcaagaggggattcgcccacacgttcagcgtttgatccagcagggcattctggtaccggttcaaagcccctggaataccccgcttttaccagtccgcaaaccgggtcgcaacgattaccgtcctgtgcaagacctgcgcgaagtcaataaacgtgtgcaggatatccacccaaccgttccgaacccgtataatctgttgtgcgcgttaccgccgcagcgttcctggtacacggtgctggacctgaaggacgcgttcttctgtcttcgcctccatcccaccagccagctgctgtttgcctttgaatggcgcgatcctgatacgggccgtactgggcaattaacatggacccgtttgccgcagggctttaagaacagtcccacgatctttgatgaggctcttcaccgcgacctcgcaaatttccgcatccaacacccacaggtaacgttactccagtatgtcgatgatcttttgttagcgggtgccaccaaacaggactgcttggaaggaacgaaagcacttctcttggaactcagcgatttaggttatcgtgtgtccgccaagaaagctcagatttgtcgccgcgaagtgacatacttaggctattcattgcgtgatggtcaacgttggcttactgaggcgcgcaagcgtaccgttgttcaaatccccgcccctaagaccgcgaaacagatgcgtgaatttcttggcacggcaggtttctgccgtttgtggattcctggctttgctacgttagcggcacccctctatgtactcacgaaagagaaaggagaattctcttgggccccagaacatcagaaagcgtttgacgccatcaagaaagcgttattaagcgctcctgctcttgcattgcccgatgtcaccaaaccattcacgctctacgtggatgaacgcaaaggcgtagcccgcggtgtgttgacacagaccttaggaccttggcgtcgtcccgtggcctacctctcgaagaaacttgacccagttgcaagtggttggcctgtctgcttgaaagctattgccgcagttgcaatcctcgtcaaagatgccgacaaacttactttgggccagaacatcactgttattgcaccacacgcccttgaaaacatcgttcgtcagccacctgatcgctggatgaccaatgctcgcatgacgcattatcagagcctcttgcttaccgaacgcgtgacttttgctccacctgcagccttaaaccccgcaacccttttacccgaagaaacagatgagcctgtgacgcatgactgtcatgaactcttgattgaagaaactggcgtacgcaaggacctcaccgatattccattaacaggtgaggtacttacgtggtttaccgaggggtcctcttatgtcgtcgaaggcaaacgtatggctggtgccgccgttgttgatggcacccgtactatctgggcaagcagcttacccgaaggcacgagtgctcagaaagcagagttgatggccttgacccaagccttacgccttgctgaagggaaatcgatcaatatttacaccgactcacgctatgcattcgccacggcacatgtacacggtgccatctacaaacaacgtggtttgttaacttctgctggccgcgagattaagaacaaagaagaaatcctttccttacttgaagccttacacctccccaaacgtctcgctattattcattgtccagggcatcagaaagcaaaagatcctatcagccgtgggaatcaaatggcagatcgtgtcgctaaacaggcagcccaaggcgttaacttgttgcccatgattgagacccctaaagctcca

SEQ ID NO: 534 - protein, 687 aa, synthetic construct
  REGION 1..687: note = Engineered reverse transcriptase variants
MHHHHHHGGSGVLTLQLDDEYRLYSPLVKPDQNIQFWLEQFPQAWAETGGMGLAKQVPPQVIQLKASATPVSVRQYPLSKEAQEGIRPHVQRLIQQGILVPVQSPWNTPLLPVRKPGRNDYRPVQDLREVNKRVQDIHPTVPNPYNLLCALPPQRSWYTVLDLKDAFFCLRLHPTSQLLFAFEWRDPDTGRTGQLTWTRLPQGFKNSPTIFDEALHRDLANFRIQHPQVTLLQYVDDLLLAGATKQDCLEGTKALLLELSDLGYRVSAKKAQICRREVTYLGYSLRDGQRWLTEARKRTVVQIPAPKTAKQMREFLGTAGFCRLWIPGFATLAAPLYVLTKEKGEFSWAPEHQKAFDAIKKALLSAPALALPDVTKPFTLYVDERKGVARGVLTQTLGPWRRPVAYLSKKLDPVASGWPVCLKAIAAVAILVKDADKLTLGQNITVIAPHALENIVRQPPDRWMTNARMTHYQSLLLTERVTFAPPAALNPATLLPEETDEPVTHDCHELLIEETGVRKDLTDIPLTGEVLTWFTEGSSYVVEGKRMAGAAVVDGTRTIWASSLPEGTSAQKAELMALTQALRLAEGKSINIYTDSRYAFATAHVHGAIYKQRGLLTSAGREIKNKEEILSLLEALHLPKRLAIIHCPGHQKAKDPISRGNQMADRVAKQAAQGVNLLPMIETPKAP

SEQ ID NO: 535 - DNA, 2061 bp, synthetic construct
  misc_feature 1..2061: note = Engineered reverse transcriptase variants
  source 1..2061: mol_type = other DNA
atgcatcaccatcaccatcatggtggtagcggagtgctgacccttcagctggatgatgaatatcgcttgtacagtccgctggtcaaaccagaccaaaacattcagttctggctcgaacagtttccgcaagcgtgggctgaaactggtggcatgggcctggccaaacaggttcctcctcaggtaatccagttaaaggcatctgcccgcccggtgtcagttcgtcagtatccgctgtcgaaagaagcgcaagaggggattcgcccagcggtgcagcgtttgatccagcagggcattctggtaccggttcaaagcccctggaataccccgcttttaccagtccgcaaaccgggtacaaacgattaccgtcctgtgcaagacctgcgcgaagtcaataaacgtgtgcaggatatccacccaaccgttccgaacccgtataatctgttgtgcgcgttaccgccgcagcgttcctggtacacggtgctggacctgaaggacgcgttcttctgtcttcgcctccatcccaccagccagctgctgtttgcctttgaatggcgcgatcctgatacgggccgtactgggcaattaacatggacccgtttgccgcagggctttaagaacagtcccacgatctttgatgaggctcttcaccgcgacctcgcaaatttccgcatccaacacccacaggtaacgttactccagtatgtcgatgatcttttgttagcgggtgccaccaaacaggactgcttggaaggaacgaaagcacttctcttggaactcagtgatttaggttatcgtgtgtccgccaagaaagctcagatttgtcgccgcgaagtgacatacttaggctattcattgcgtgatggtcaacgttggcttactgaggcgcgcaaacgtaccgtcgttcaagggccccctcctaagaccgcgaaacagatgcgtgaatttcttggcacggcaggtttctgccgtttgtggattcctggctttgctactttagcggcacccctctatgtactcacgaaagagaaaggagaattctcttgggccccagaacatcagaaagcgtttgacgccatcaagaaagcgttattaagcgctcctgctcttgcattgcccgatgtcaccaaaccattcacgctctacgtggatgaacgcaaaggcgtagcccgcggtgtgttgacacagaccttaggaccttggcgtcgtcccgtggcctacctctcgaagaaacttgacccagttgcaagtggttggcctgtctgcttgaaagctattgccgcagttgcaatcctcgtcaaagatgccgacaaacttactttgggccagaacatcactgttattgcaccacacgcccttgaaaacatcgttcgtcagccacctgatcgctggatgaccaatgctcgcatgacgcattatcagagcctcttgcttaccgaacgcgtgacttttgctccacctgcagccttaaaccccgcaacccttttacccgaagaaacagatgagcctgtgacgcatgactgtcatgaactcttgattgaagaaactggcgtacgcaaggacctcaccgatattccattaacaggtgaggtacttacgtggtttaccgaggggtcctcttatgtcgtcgaaggcaaacgtatggctggtgccgccgttgttgatggcacccgtactatctgggcaagcagcttacccgaaggcacgagtgctcagaaagcacagttgatggccttgacccaagccttacgccttgctgaagggaaatcgatcaatatttacaccgattcacgctatgcattcgccacggcacatgtacacggtgccatctacaaacaacgtggtttgttaacttctgctggccgcgagattaagaacaaagaagaaatcctttccttacttgaagccttacacctccccaaacgtctcgctattattcattgtccagggcatcagaaagcaaaagatcctatcagccgtgggaatcaaatggcagatcgtgtcgctaaacaggcagcccaaggcgttaacttgttgcccatgattgagacccctaaagctcca

SEQ ID NO: 536 - protein, 687 aa, synthetic construct
  REGION 1..687: note = Engineered reverse transcriptase variants
MHHHHHHGGSGVLTLQLDDEYRLYSPLVKPDQNIQFWLEQFPQAWAETGGMGLAKQVPPQVIQLKASARPVSVRQYPLSKEAQEGIRPAVQRLIQQGILVPVQSPWNTPLLPVRKPGTNDYRPVQDLREVNKRVQDIHPTVPNPYNLLCALPPQRSWYTVLDLKDAFFCLRLHPTSQLLFAFEWRDPDTGRTGQLTWTRLPQGFKNSPTIFDEALHRDLANFRIQHPQVTLLQYVDDLLLAGATKQDCLEGTKALLLELSDLGYRVSAKKAQICRREVTYLGYSLRDGQRWLTEARKRTVVQGPPPKTAKQMREFLGTAGFCRLWIPGFATLAAPLYVLTKEKGEFSWAPEHQKAFDAIKKALLSAPALALPDVTKPFTLYVDERKGVARGVLTQTLGPWRRPVAYLSKKLDPVASGWPVCLKAIAAVAILVKDADKLTLGQNITVIAPHALENIVRQPPDRWMTNARMTHYQSLLLTERVTFAPPAALNPATLLPEETDEPVTHDCHELLIEETGVRKDLTDIPLTGEVLTWFTEGSSYVVEGKRMAGAAVVDGTRTIWASSLPEGTSAQKAQLMALTQALRLAEGKSINIYTDSRYAFATAHVHGAIYKQRGLLTSAGREIKNKEEILSLLEALHLPKRLAIIHCPGHQKAKDPISRGNQMADRVAKQAAQGVNLLPMIETPKAP

SEQ ID NO: 537 - DNA, 2061 bp, synthetic construct
  misc_feature 1..2061: note = Engineered reverse transcriptase variants
  source 1..2061: mol_type = other DNA
atgcatcaccatcaccatcatggtggtagcggagtgctgacccttcagctggatgatgaatatcgcttgtacagtccgctggtcaaaccagaccaaaacattcagttctggctcgaacagtttccgcaagcgtgggctgaaactggtggcatgggcctggccaaacaggttcctcctcaggtaatccagttaaaggcatctgccacgccggtgtcagttcgtcagtatccgctgtcgaaagaagcgcaagaggggattcgcccacatgtgcagcgtttgatccagcagggcattctggtaccggttcaaagcccctggaataccccgcttttaccagggcgcaaaccgggtacaaacgattaccgtcctgtgcaagacctgcgcgaagtcaataaacgtgtgcaggatatccacccaaccgttccgaacccgtataatctgttgtgcgcgttaccgccgcagcgttcctggtacacggtgctggacctgaaggacgcgttcttctgtcttcgcctccatcccaccagccagccactgtttgcctttgaatggcgcgatcctgatacgggccgtactgggcaattaacatggacccgtttgccgcagggctttaagaacagtcccacgatctttgatgaggctcttcaccgcgacctcgcaaatttccgcatccaacacccacaggtaacgttactccagtatgtcgatgatcttttgttagcgggtgccaccaaacaggactgcttggaaggaacgaaagcacttctcttggaactcagtgatttaggttatcgtgtgtccgccaagaaagctcagatttgtcgccgcgaagtgacatacttaggctattcattgcgtgatggtcaacgttggcttactgaggcgcgcaaacgtaccgtcgttcaaattcccgctcctaagaccgcgaaacagatgcgtgaatttcttggcacggcaggtttctgccgtttgtggattcctggctttgctacgttagcggcacccctctatccactcacgaaagagaaaggagaattctcttgggccccagaacatcagaaagcgtttgacgccatcaagaaagcgttattaagcgctcctgctcttgcattgcccgatgtcaccaaaccattcacgctctacgtggatgaacgcaaaggcgtagcccgcggtgtgttgacacagaccttaggaccttggcgtcgtcccgtggcctacctctcgaagaaacttgacccagttgcaagtggttggcctgtctgcttgaaagctattgccgcagttgcaatcctcgtcaaagatgccgacaaacttactttgggccagaacctgactgttattgcaccacacgcccttgaaaacatcgttcgtcagccacctgatcgctggatgaccaatgctcgcatgacgcattatcagagcctcttgcttaccgaacgcgtgacttttgctccacctgcagccttaaaccccgcaacccttttacccgaagaaacagatgagcctgtgacgcatgactgtcatgaactcttgattgaagaaactggcgtacgcaaggacctcaccgatattccattaacaggtgaggtacttacgtggtttaccgaggggtcctcttatgtcgtcgaaggcaaacgtatggctggtgccgccgttgttgatggcacccgtactatctgggcaagcagcttacccgaaggcacgagtgctcagaaagcagagttgatggccttgacccaagccttacgccttgctgaagggaaatcgatcaatatttacaccgattcacgctatgcattcgccacggcacatgtacacggtgccatctacaaacaacgtggtttgttaacttctgctggccgcgagattaagaacaaagaagaaatcctttccttacttgaagccttacacctccccaaacgtctcgctattattcattgtccagggcatcagaaagcaaaagatcctatcagccgtgggaatcaaatggcagatcgtgtcgctaaacaggcagcccaaggcgttaacttgttgcccatgattgagacccctaaagctcca

SEQ ID NO: 538 - protein, 687 aa, synthetic construct
  REGION 1..687: note = Engineered reverse transcriptase variants
MHHHHHHGGSGVLTLQLDDEYRLYSPLVKPDQNIQFWLEQFPQAWAETGGMGLAKQVPPQVIQLKASATPVSVRQYPLSKEAQEGIRPHVQRLIQQGILVPVQSPWNTPLLPGRKPGTNDYRPVQDLREVNKRVQDIHPTVPNPYNLLCALPPQRSWYTVLDLKDAFFCLRLHPTSQPLFAFEWRDPDTGRTGQLTWTRLPQGFKNSPTIFDEALHRDLANFRIQHPQVTLLQYVDDLLLAGATKQDCLEGTKALLLELSDLGYRVSAKKAQICRREVTYLGYSLRDGQRWLTEARKRTVVQIPAPKTAKQMREFLGTAGFCRLWIPGFATLAAPLYPLTKEKGEFSWAPEHQKAFDAIKKALLSAPALALPDVTKPFTLYVDERKGVARGVLTQTLGPWRRPVAYLSKKLDPVASGWPVCLKAIAAVAILVKDADKLTLGQNLTVIAPHALENIVRQPPDRWMTNARMTHYQSLLLTERVTFAPPAALNPATLLPEETDEPVTHDCHELLIEETGVRKDLTDIPLTGEVLTWFTEGSSYVVEGKRMAGAAVVDGTRTIWASSLPEGTSAQKAELMALTQALRLAEGKSINIYTDSRYAFATAHVHGAIYKQRGLLTSAGREIKNKEEILSLLEALHLPKRLAIIHCPGHQKAKDPISRGNQMADRVAKQAAQGVNLLPMIETPKAP

SEQ ID NO: 539 - DNA, 2061 bp, synthetic construct
  misc_feature 1..2061: note = Engineered reverse transcriptase variants
  source 1..2061: mol_type = other DNA
atgcatcaccatcaccatcatggtggtagcggagtgctgacccttcagctggatgatgaatatcgcttgtacagtccgctggtcaaaccagaccaaaacattcagttctggctcgaacagtttccgcaagcgtgggctgaaactggtggcatgggcctggccaaacaggttcctcctcaggtaatccagttaaaggcatctgccacgccggtgtcagttcgtcagtatccgctgtcgaaagaagcgcaagaggggattcgcccacatgtgcagcgtttgatccagcagggcattctggtaccggttcaaagcccctggaataccccgcttttaccagggcgcaaaccgggtacaaacgattaccgtcctgtgcaagacctgcgcgaagtcaataaacgtgtgcaggatatccacccaaccgttccgaacccgtataatctgttgtgcgcgttaccgccgcagcgttcctggtacacggtgctggacctgaaggacgcgttcttctgtcttcgcctccatcccaccagccagctgctgtttgcctttgaatggcgcgatcctgatacgggccgtactgggcaattaacatggacccgtttgccgcagggctttaagaacagtcccacgatctttgatgaggctcttcaccgcgacctcgcaaatttccgcatccaacacccacaggtaacgttactccagtatgtcgatgatcttttgttagcgggtgccaccaaacaggactgcttggaaggaacgaaagcacttctcttggaactcggcgatttaggttatcgtgtgtccgccaagaaagctcagatttgtcgccgcgaagtgacatacttaggctattcattgcgtgatggtcaacgttggcttactgaggcgcgcaaacgtaccgtcgttcaaattcccgctcctaagaccgcgaaacagatgcgtgaatttcttggcacggcaggtttctgccgtttgtggattcctggctttgctacgttagcggcacccctctatccactcacgaaagagaaaggagaattctcttgggccccagaacatcagaaagcgtttgacgccatcaagaaagcgttattaagcgctcctgctcttgcattgcccgatgtcaccaaaccattcacgctctacgtggatgaacgcaaaggcgtagcccgcggtgtgttgacacagaccttaggaccttggcgtcgtcccgtggcctacctctcgaagaaacttgacccagttgcaagtggttggcctgtctgcttgaaagctattgccgcagttgcaatcctcgtcaaagatgccgacaaacttactttgggccagaacctgactgttattgcaccacacgcccttgaaaacatcgttcgtcagccacctgatcgctggatgaccaatgctcgcatgacgcattatcagagcctcttgcttaccgaacgcgtgacttttgctccacctgcagccttaaaccccgcaacccttttacccgaagaaacagatgagcctgtgacgcatgactgtcatgaactcttgattgaagaaactggcgtacgcaaggacctcaccgatattccattaacaggtgaggtacttacgtggtttaccgaggggtcctcttatgtcgtcgaaggcaaacgtatggctggtgccgccgttgttgatggcacccgtactatctgggcaagcagcttacccgaaggcacgagtgctcagaaagcagagttgatggccttgacccaagccttacgccttgctgaagggaaatcgatcaatatttacaccgattcacgctatgcattcgccacggcacatgtacacggtgccatctacaaacaacgtggtttgttaacttctgctggccgcgagattaagaacaaagaagaaatcctttccttacttgaagccttacacctccccaaacgtctcgctattattcattgtccagggcatcagaaagcaaaagatcctatcagccgtgggaatcaaatggcagatcgtgtcgctaaacaggcagcccaaggcgttaacttgttgcccatgattgagacccctaaagctcca

SEQ ID NO: 540 - protein, 687 aa, synthetic construct
  REGION 1..687: note = Engineered reverse transcriptase variants
MHHHHHHGGSGVLTLQLDDEYRLYSPLVKPDQNIQFWLEQFPQAWAETGGMGLAKQVPPQVIQLKASATPVSVRQYPLSKEAQEGIRPHVQRLIQQGILVPVQSPWNTPLLPGRKPGTNDYRPVQDLREVNKRVQDIHPTVPNPYNLLCALPPQRSWYTVLDLKDAFFCLRLHPTSQLLFAFEWRDPDTGRTGQLTWTRLPQGFKNSPTIFDEALHRDLANFRIQHPQVTLLQYVDDLLLAGATKQDCLEGTKALLLELGDLGYRVSAKKAQICRREVTYLGYSLRDGQRWLTEARKRTVVQIPAPKTAKQMREFLGTAGFCRLWIPGFATLAAPLYPLTKEKGEFSWAPEHQKAFDAIKKALLSAPALALPDVTKPFTLYVDERKGVARGVLTQTLGPWRRPVAYLSKKLDPVASGWPVCLKAIAAVAILVKDADKLTLGQNLTVIAPHALENIVRQPPDRWMTNARMTHYQSLLLTERVTFAPPAALNPATLLPEETDEPVTHDCHELLIEETGVRKDLTDIPLTGEVLTWFTEGSSYVVEGKRMAGAAVVDGTRTIWASSLPEGTSAQKAELMALTQALRLAEGKSINIYTDSRYAFATAHVHGAIYKQRGLLTSAGREIKNKEEILSLLEALHLPKRLAIIHCPGHQKAKDPISRGNQMADRVAKQAAQGVNLLPMIETPKAP

SEQ ID NO: 541 - DNA, 2061 bp, synthetic construct
  misc_feature 1..2061: note = Engineered reverse transcriptase variants
  source 1..2061: mol_type = other DNA
atgcatcaccatcaccatcatggtggtagcggagtgctgacccttcagctggatgatgaatatcgcttgtacagtccgctggtcaaaccagaccaaaacattcagttctggctcgaacagtttccgcaagcgtgggctgaaactggtggcatgggcctggccaaacaggttcctcctcaggtaatccagttaaaggcatctgccacgccggtgtcagttcgtcagtatccgctgtcgaaagaagcgcaggaggggattcgcccacacgtgcagcgtttgatccagcagggcattctggtaccggttcaaagcccctggaataccccgcttttaccaactcgtaaaccgggtacaaacgattaccgtcctgtgcaagacctgcgcgaagtcaataaacgtgtgcaggatatccacccaaccgttccgaacccgtataatctgttgtgcgcgttaccgccgcagcgttcctggtacacggtgctggacctgaaggacgcgttcttctgtcttcgcctccatcccaccagccagccactgtttgcctttgaatggcgcgatcctgatacgggccgtactgggcaattaacatggacccgtttgccgcagggctttaagaacagtcccacgatctttgatgaggctcttcaccgcgacctcgcaaatttccgcatccaacacccacaggtaacgttactccagtatgtcgatgatcttttgttagcgggtgccaccaaacaggactgcttggaaggaacgaaagcacttctcttggaactcagtgatttaggttatcgtgtgtccgccaagaaagctcagatttgtcgccgcgaagtgacatacttaggctattcattgcgtgatggtcaacgttggcttactgaggcgcgcaagcgtaccgtcgttcaaatccccgcccctaagactgaaaaacagatgcgtgaatttcttggcacggcaggtttctgccgtttgtggattcctggctttgctacgttagcggcacccctctatccactcacgaaagagaaaggagaattctcttgggccccagaacatcagaaagcgtttgacgccatcaagaaagcgttattaagcgctcctgctcttgcattgcccgatgtcaccaaaccattcacgctctacgtggatgaacgcaaaggcgtagcccgcggtgtgttgacacagaccttaggaccttggcgtcgtcccgtggcctacctctcgaagaaacttgacccagttgcaagtggttggcctgtctgcttgaaagctattgccgcagttgcaatcctcgtcaaagatgccgacaaacttactttgggccagaacctgactgttattgcaccacacgcccttgaaaacatcgttcgtcagccacctgatcgctggatgaccaatgctcgcatgacgcattatcagagcctcttgcttaccgaacgcgtgacttttgctccacctgcagccttaaaccccgcaacccttttacccgaagaaacagatgagcctgtgacgcatgactgtcatgaactcttgattgaagaaactggcgtacgcaaggacctcaccgatattccattaacaggtgaggtacttacgtggtttaccgaggggtcctcttatgtcgtcgaaggcaaacgtatggctggtgccgccgttgttgatggcacccgtactatctgggcaagcagcttacccgaaggcacgagtgctcagaaagcagagttgatggccttgacccaagccttacgccttgctgaagggaaatcgatcaatatttacaccgattcacgctatgcattcgccacggcacatgtacacggtgccatctacaaacaacgtggtttgttaacttctgctggccgcgagattaagaacaaagaagaaatcctttccttacttgaagccttacacctccccaaacgtctcgctattattcattgtccagggcatcagaaagcaaaagatcctatcagccgtgggaatcaaatggcagatcgtgtcgctaaacaggcagcccaaggcgttaacttgttgcccatgattgagacccctaaagctcca

SEQ ID NO: 542 - protein, 687 aa, synthetic construct
  REGION 1..687: note = Engineered reverse transcriptase variants
MHHHHHHGGSGVLTLQLDDEYRLYSPLVKPDQNIQFWLEQFPQAWAETGGMGLAKQVPPQVIQLKASATPVSVRQYPLSKEAQEGIRPHVQRLIQQGILVPVQSPWNTPLLPTRKPGTNDYRPVQDLREVNKRVQDIHPTVPNPYNLLCALPPQRSWYTVLDLKDAFFCLRLHPTSQPLFAFEWRDPDTGRTGQLTWTRLPQGFKNSPTIFDEALHRDLANFRIQHPQVTLLQYVDDLLLAGATKQDCLEGTKALLLELSDLGYRVSAKKAQICRREVTYLGYSLRDGQRWLTEARKRTVVQIPAPKTEKQMREFLGTAGFCRLWIPGFATLAAPLYPLTKEKGEFSWAPEHQKAFDAIKKALLSAPALALPDVTKPFTLYVDERKGVARGVLTQTLGPWRRPVAYLSKKLDPVASGWPVCLKAIAAVAILVKDADKLTLGQNLTVIAPHALENIVRQPPDRWMTNARMTHYQSLLLTERVTFAPPAALNPATLLPEETDEPVTHDCHELLIEETGVRKDLTDIPLTGEVLTWFTEGSSYVVEGKRMAGAAVVDGTRTIWASSLPEGTSAQKAELMALTQALRLAEGKSINIYTDSRYAFATAHVHGAIYKQRGLLTSAGREIKNKEEILSLLEALHLPKRLAIIHCPGHQKAKDPISRGNQMADRVAKQAAQGVNLLPMIETPKAP

SEQ ID NO: 543 - DNA, 2061 bp, synthetic construct
  misc_feature 1..2061: note = Engineered reverse transcriptase variants
  source 1..2061: mol_type = other DNA
atgcatcaccatcaccatcatggtggtagcggagtgctgacccttcagctggatgatgaatatcgcttgtacagtccgctggtcaaaccagaccaaaacattcagttctggctcgaacagtttccgcaagcgtgggctgaaactggtggcatgggcctggccaaacaggttcctcctcaggtaatccagttaaaggcatctgccacgccggtgtcagttcgtcagtatccgctgtcgaaagaagcgcaggaggggattcgcccacacgtgcagcgtttgatccagcagggcattctggtaccggttcaaagcccctggaataccccgcttttaccaactcgtaaaccgggtacaaacgattaccgtcctgtgcaagacctgcgcgaagtcaataaacgtgtgcaggatatccacccaaccgttccgaacccgtataatctgttgtgcgcgttaccgccgcagcgttcctggtacacggtgctggacctgaaggacgcgttcttctgtcttcgcctccatcccaccagccagccactgtttgcctttgaatggcgcgatcctgatacgggccgtactgggcaattaacatggacccgtttgccgcagggctttaagaacagtcccacgatctttaaggaggctcttcaccgcgacctcgcaaatttccgcatccaacacccacaggtaacgttactccagtatgtcgatgatcttttgttagcgggtgccaccaaacaggactgcttggaaggaacgaaagcacttctcttggaactcagtgatttaggttatcgtgtgtccgccaagaaagctcagatttgtcgccgcgaagtgacatacttaggctattcattgcgtgatggtcaacgttggcttactgaggcgcgcaagcgtaccgtcgttcaaatccccgcccctaagactgaaaaacagatgcgtgaatttcttggcacggcaggtttctgccgtttgtggattcctggctttgctacgttagcggcacccctctatccactcacgaaagagaaaggagaattctcttgggccccagaacatcagaaagcgtttgacgccatcaagaaagcgttattaagcgctcctgctcttgcattgcccgatgtcaccaaaccattcacgctctacgtggatgaacgcaaaggcgtagcccgcggtgtgttgacacagaccttaggaccttggcgtcgtcccgtggcctacctctcgaagaaacttgacccagttgcaagtggttggcctgtctgcttgaaagctattgccgcagttgcaatcctcgtcaaagatgccgacaaacttactttgggccagaacctgactgttattgcaccacacgcccttgaaaacatcgttcgtcagccacctgatcgctggatgaccaatgctcgcatgacgcattatcagagcctcttgcttaccgaacgcgtgacttttgctccacctgcagccttaaaccccgcaacccttttacccgaagaaacagatgagcctgtgacgcatgactgtcatgaactcttgattgaagaaactggcgtacgcaaggacctcaccgatattccattaacaggtgaggtacttacgtggtttaccgaggggtcctcttatgtcgtcgaaggcaaacgtatggctggtgccgccgttgttgatggcacccgtactatctgggcaagcagcttacccgaaggcacgagtgctcagaaagcagagttgatggccttgacccaagccttacgccttgctgaagggaaatcgatcaatatttacaccgattcacgctatgcattcgccacggcacatgtacacggtgccatctacaaacaacgtggtttgttaacttctgctggccgcgagattaagaacaaagaagaaatcctttccttacttgaagccttacacctccccaaacgtctcgctattattcattgtccagggcatcagaaagcaaaagatcctatcagccgtgggaatcaaatggcagatcgtgtcgctaaacaggcagcccaaggcgttaacttgttgcccatgattgagacccctaaagctcca

SEQ ID NO: 544 - protein, 687 aa, synthetic construct
  REGION 1..687: note = Engineered reverse transcriptase variants
MHHHHHHGGSGVLTLQLDDEYRLYSPLVKPDQNIQFWLEQFPQAWAETGGMGLAKQVPPQVIQLKASATPVSVRQYPLSKEAQEGIRPHVQRLIQQGILVPVQSPWNTPLLPTRKPGTNDYRPVQDLREVNKRVQDIHPTVPNPYNLLCALPPQRSWYTVLDLKDAFFCLRLHPTSQPLFAFEWRDPDTGRTGQLTWTRLPQGFKNSPTIFKEALHRDLANFRIQHPQVTLLQYVDDLLLAGATKQDCLEGTKALLLELSDLGYRVSAKKAQICRREVTYLGYSLRDGQRWLTEARKRTVVQIPAPKTEKQMREFLGTAGFCRLWIPGFATLAAPLYPLTKEKGEFSWAPEHQKAFDAIKKALLSAPALALPDVTKPFTLYVDERKGVARGVLTQTLGPWRRPVAYLSKKLDPVASGWPVCLKAIAAVAILVKDADKLTLGQNLTVIAPHALENIVRQPPDRWMTNARMTHYQSLLLTERVTFAPPAALNPATLLPEETDEPVTHDCHELLIEETGVRKDLTDIPLTGEVLTWFTEGSSYVVEGKRMAGAAVVDGTRTIWASSLPEGTSAQKAELMALTQALRLAEGKSINIYTDSRYAFATAHVHGAIYKQRGLLTSAGREIKNKEEILSLLEALHLPKRLAIIHCPGHQKAKDPISRGNQMADRVAKQAAQGVNLLPMIETPKAP

SEQ ID NO: 545 - DNA, 2061 bp, synthetic construct
  misc_feature 1..2061: note = Engineered reverse transcriptase variants
  source 1..2061: mol_type = other DNA
atgcatcaccatcaccatcatggtggtagcggagtgctgacccttcagctggatgatgaatatcgcttgtacagtccgctggtcaaaccagaccaaaacattcagttctggctcgaacagtttccgcaagcgtgggctgaaactggtggcatgggcctggccaaacaggttcctcctcaggtaatccagttaaaggcatctgccacgccggtgtcagttcgtcagtatccgctgtcgaaagaagcgcaggaggggattcgcccacacgtgcagcgtttgatccagcagggcattctggtaccggttcaaagcccctggaataccccgcttttaccaactcgtaaaccgggtacaaacgattaccgtcctgtgcaagacctgcgcgaagtcaataaacgtgtgcaggatatccacccaaccgttccgaacccgtataatctgttgtgcgcgttaccgccgcagcgttcctggtacacggtgctggacctgaaggacgcgttcttctgtcttcgcctccatcccaccagccagccactgtttgcctttgaatggcgcgatcctgatacgggccgtactgggcaattaacatggacccgtttgccgcagggctttaagaacagtcccacgatctttgatgaggctcttcaccgcgacctcgcaaatttccgcatccaacacccacaggtaacgttactccagtatgtcgatgatcttttgttagcgggtgccaccaaacaggactgcttggaaggaacgaaagcacttctcttggaactcagtgatttaggttatcgtgtgtccgccaagaaagctcagatttgtcgccgcgaagtgacatacttaggctattcattgcgtgatggtcaacgttggcttactgaggcgcgcaagcgcaccgtcgttcaaatccccgcccctaagaccgcgaaacagatgcgtgaatttcttggcacggcaggtttctgccgtttgtggattcctggctttgctacgttagcggcacccctctatccactcacgaaatggaaaggagaattctcttgggccccagaacatcagaaagcgtttgacgccatcaagaaagcgttattaagcgctcctgctcttgcattgcccgatgtcaccaaaccattcacgctctacgtggatgaacgcaaaggcgtagcccgcggtgtgttgacacagaccttaggaccttggcgtcgtcccgtggcctacctctcgaagaaacttgacccagttgcaagtggttggcctgtctgcttgaaagctattgccgcagttgcaatcctcgtcaaagatgccgacaaacttactttgggccagaacctgactgttattgcaccacacgcccttgaaaacatcgttcgtcagccacctgatcgctggatgaccaatgctcgcatgacgcattatcagagcctcttgcttaccgaacgcgtgacttttgctccacctgcagccttaaaccccgcaacccttttacccgaagaaacagatgagcctgtgacgcatgactgtcatgaactcttgattgaagaaactggcgtacgcaaggacctcaccgatattccattaacaggtgaggtacttacgtggtttaccgaggggtcctcttatgtcgtcgaaggcaaacgtatggctggtgccgccgttgttgatggcacccgtactatctgggcaagcagcttacccgaaggcacgagtgctcagaaagcagaattgatggccttgacccaagccttacgccttgctgaagggaaatcgatcaatatttacaccgattcacgctatgcattcgccacggcacatgtacacggtgccatctacaaacaacgtggtttgttaacttctgctggccgcgagattaagaacaaagaagaaatcctttccttacttgaagccttacacctccccaaacgtctcgctattattcattgtccagggcatcagaaagcaaaagatcctatcagccgtgggaatcaaatggcagatcgtgtcgctaaacaggcagcccaaggcgttaacttgttgcccatgattgagacccctaaagctcca

SEQ ID NO: 546 - protein, 687 aa, synthetic construct
  REGION 1..687: note = Engineered reverse transcriptase variants
MHHHHHHGGSGVLTLQLDDEYRLYSPLVKPDQNIQFWLEQFPQAWAETGGMGLAKQVPPQVIQLKASATPVSVRQYPLSKEAQEGIRPHVQRLIQQGILVPVQSPWNTPLLPTRKPGTNDYRPVQDLREVNKRVQDIHPTVPNPYNLLCALPPQRSWYTVLDLKDAFFCLRLHPTSQPLFAFEWRDPDTGRTGQLTWTRLPQGFKNSPTIFDEALHRDLANFRIQHPQVTLLQYVDDLLLAGATKQDCLEGTKALLLELSDLGYRVSAKKAQICRREVTYLGYSLRDGQRWLTEARKRTVVQIPAPKTAKQMREFLGTAGFCRLWIPGFATLAAPLYPLTKWKGEFSWAPEHQKAFDAIKKALLSAPALALPDVTKPFTLYVDERKGVARGVLTQTLGPWRRPVAYLSKKLDPVASGWPVCLKAIAAVAILVKDADKLTLGQNLTVIAPHALENIVRQPPDRWMTNARMTHYQSLLLTERVTFAPPAALNPATLLPEETDEPVTHDCHELLIEETGVRKDLTDIPLTGEVLTWFTEGSSYVVEGKRMAGAAVVDGTRTIWASSLPEGTSAQKAELMALTQALRLAEGKSINIYTDSRYAFATAHVHGAIYKQRGLLTSAGREIKNKEEILSLLEALHLPKRLAIIHCPGHQKAKDPISRGNQMADRVAKQAAQGVNLLPMIETPKAP

SEQ ID NO: 547 - DNA, 2061 bp, synthetic construct
  misc_feature 1..2061: note = Engineered reverse transcriptase variants
  source 1..2061: mol_type = other DNA
atgcatcaccatcaccatcatggtggtagcggagtgctgacccttcagctggatgatgaatatcgcttgtacagtccgctggtcaaaccagaccaaaacattcagttctggctcgaacagtttccgcaagcgtgggctgaaactggtggcatgggcctggccaaacaggttcctcctcaggtaatccagttaaaggcatctgccacgccggtgtcagttcgtcagtatccgctgtcgaaagaagcgcaagaggggattcgcccacacgtgcagcgtttgatccagcagggcattctggtaccggttcaaagcccctggaataccccgcttttaccaactggtaaaccgggtacaaacgattaccgtcctgtgcaagacctgcgcgaagtcaataaacgtgtgcaggatatccacccaaccgttccgaacccgtataatctgttgtgcgcgttaccgccgcagcgttcctggtacacggtgctggacctgaaggacgcgttcttctgtcttcgcctccatcccaccagccagccactgtttgcctttgaatggcgcgatcctgatacgggccgtactgggcaattaacatggacccgtttgccgcagggctttaagaacagtcccacgatctttgacgaggctcttcaccgcgacctcgcaaatttccgcatccaacacccacaggtaacgttactccagtatgtcgatgatcttttgttagcgggtgccaccaaacaggactgcttggaaggaacgaaagcacttctcttggaactcagtgatttaggttatcgtgtgtccgccaagaaagctcagatttgtcgccgcgaagtgacatacttaggctattcattgcgtgatggtcaacgttggcttactgaggcgcgcaagcgcaccgtcgttcaaatccccgcccctaagaccgcgaaacagatgcgtgaatttcttggcacggcaggtttctgccgtttgtggattcctggctttgctacgttagcggcacccctctatccactcacgaaagagaaaggagaattctcttgggccccagaacatcagaaagcgtttgacgccatcaagaaagcgttattaagcgctcctgctcttgcattgcccgatgtcaccaaaccattcacgctctacgtggatgaacgcaaaggcgtagcccgcggtgtgttgacacagaccttaggaccttggcgtcgtcccgtggcctacctctcgaagaaacttgacccagttgcaagtggttggcctgtctgcttgaaagctattgccgcagttgcaatcctcgtcaaagatgccgacaaacttactttgggccagaacctgactgttattgcaccacacgcccttgaaaacatcgttcgtcagccacctgatcgctggatgaccaatgctcgcatgacgcattatcagagcctcttgcttaccgaacgcgtgacttttgctccacctgcagccttaaaccccgcaacccttttacccgaagaaacagatgagcctgtgacgcatgactgtcatgaactcttgattgaagaaactggcgtacgcaaggacctcaccgatattccattaacaggtgaggtacttacgtggtttaccgaggggtcctcttatgtcgtcgaaggcaaacgtatggctggtgccgccgttgttgatggcacccgtactatctgggcaagcagcttacccgaaggcacgagtgctcagaaagcagagttgatggccttgacccaagccttacgccttgctgaagggaaatcgatcaatatttacaccgattcacgctatgcattcgccacggcacatgtacacggtgccatctacaaacaacgtggtttgttaacttctgctggccgcgagattaagaacaaagaagaaatcctttccttacttgaagccttacacctccccaaacgtctcgctattattcattgtccagggcatcagaaagcaaaagatcctatcagccgtgggaatcaaatggcagatcgtgtcgctaaacaggcagcccaaggcgttaacttgttgcccatgattgagacccctaaagctcca

SEQ ID NO: 548 - protein, 687 aa, synthetic construct
  REGION 1..687: note = Engineered reverse transcriptase variants
MHHHHHHGGSGVLTLQLDDEYRLYSPLVKPDQNIQFWLEQFPQAWAETGGMGLAKQVPPQVIQLKASATPVSVRQYPLSKEAQEGIRPHVQRLIQQGILVPVQSPWNTPLLPTGKPGTNDYRPVQDLREVNKRVQDIHPTVPNPYNLLCALPPQRSWYTVLDLKDAFFCLRLHPTSQPLFAFEWRDPDTGRTGQLTWTRLPQGFKNSPTIFDEALHRDLANFRIQHPQVTLLQYVDDLLLAGATKQDCLEGTKALLLELSDLGYRVSAKKAQICRREVTYLGYSLRDGQRWLTEARKRTVVQIPAPKTAKQMREFLGTAGFCRLWIPGFATLAAPLYPLTKEKGEFSWAPEHQKAFDAIKKALLSAPALALPDVTKPFTLYVDERKGVARGVLTQTLGPWRRPVAYLSKKLDPVASGWPVCLKAIAAVAILVKDADKLTLGQNLTVIAPHALENIVRQPPDRWMTNARMTHYQSLLLTERVTFAPPAALNPATLLPEETDEPVTHDCHELLIEETGVRKDLTDIPLTGEVLTWFTEGSSYVVEGKRMAGAAVVDGTRTIWASSLPEGTSAQKAELMALTQALRLAEGKSINIYTDSRYAFATAHVHGAIYKQRGLLTSAGREIKNKEEILSLLEALHLPKRLAIIHCPGHQKAKDPISRGNQMADRVAKQAAQGVNLLPMIETPKAP

SEQ ID NO: 549 - DNA, 2061 bp, synthetic construct
  misc_feature 1..2061: note = Engineered reverse transcriptase variants
  source 1..2061: mol_type = other DNA
atgcatcaccatcaccatcatggtggtagcggagtgctgacccttcagctggatgatgaatatcgcttgtacagtccgctggtcaaaccagaccaaaacattcagttctggctcgaacagtttccgcaagcgtgggctgaaactggtggcatgggcctggccaaacaggttcctcctcaggtaatccagttaaaggcatctgccacgccggtgtcagttcgtcagtatccgctgtcgaaagaagcgcaagaggggattcgcccacacgtgcagcgtttgatccagcagggcattctggtaccggttcaaagcccctggaataccccgcttttaccaactggtaaaccgggtacaaacgattaccgtcctgtgcaagacctgcgcgaagtcaataaacgtgtgcaggatatccacccaaccgttccgaacccgtataatctgttgtgcgcgttaccgccgcagcgttcctggtacacggtgctggacctgaaggacgcgttcttctgtcttcgcctccatcccaccagccagccactgtttgcctttgaatggcgcgatcctgatacgggccgtactgggcaattaacatggacccgtttgccgcagggctttaagaacagtcccacgatctttaaggaggctcttcaccgcgacctcgcaaatttccgcatccaacacccacaggtaacgttactccagtatgtcgatgatcttttgttagcgggtgccaccaaacaggactgcttggaaggaacgaaagcacttctcttggaactcagtgatttaggttatcgtgtgtccgccaagaaagctcagatttgtcgccgcgaagtgacatacttaggctattcattgcgtgatggtcaacgttggcttactgaggcgcgcaagcgcaccgtcgttcaaatccccgcccctaagaccgcgaaacagatgcgtgaatttcttggcacggcaggtttctgccgtttgtggattcctggctttgctacgttagcggcacccctctatccactcacgaaagagaaaggagaattctcttgggccccagaacatcagaaagcgtttgacgccatcaagaaagcgttattaagcgctcctgctcttgcattgcccgatgtcaccaaaccattcacgctctacgtggatgaacgcaaaggcgtagcccgcggtgtgttgacacagaccttaggaccttggcgtcgtcccgtggcctacctctcgaagaaacttgacccagttgcaagtggttggcctgtctgcttgaaagctattgccgcagttgcaatcctcgtcaaagatgccgacaaacttactttgggccagaacctgactgttattgcaccacacgcccttgaaaacatcgttcgtcagccacctgatcgctggatgaccaatgctcgcatgacgcattatcagagcctcttgcttaccgaacgcgtgacttttgctccacctgcagccttaaaccccgcaacccttttacccgaagaaacagatgagcctgtgacgcatgactgtcatgaactcttgattgaagaaactggcgtacgcaaggacctcaccgatattccattaacaggtgaggtacttacgtggtttaccgaggggtcctcttatgtcgtcgaaggcaaacgtatggctggtgccgccgttgttgatggcacccgtactatctgggcaagcagcttacccgaaggcacgagtgctcagaaagcagagttgatggccttgacccaagccttacgccttgctgaagggaaatcgatcaatatttacaccgattcacgctatgcattcgccacggcacatgtacacggtgccatctacaaacaacgtggtttgttaacttctgctggccgcgagattaagaacaaagaagaaatcctttccttacttgaagccttacacctccccaaacgtctcgctattattcattgtccagggcatcagaaagcaaaagatcctatcagccgtgggaatcaaatggcagatcgtgtcgctaaacaggcagcccaaggcgttaacttgttgcccatgattgagacccctaaagctcca

SEQ ID NO: 550 - protein, 687 aa, synthetic construct
  REGION 1..687: note = Engineered reverse transcriptase variants
MHHHHHHGGSGVLTLQLDDEYRLYSPLVKPDQNIQFWLEQFPQAWAETGGMGLAKQVPPQVIQLKASATPVSVRQYPLSKEAQEGIRPHVQRLIQQGILVPVQSPWNTPLLPTGKPGTNDYRPVQDLREVNKRVQDIHPTVPNPYNLLCALPPQRSWYTVLDLKDAFFCLRLHPTSQPLFAFEWRDPDTGRTGQLTWTRLPQGFKNSPTIFKEALHRDLANFRIQHPQVTLLQYVDDLLLAGATKQDCLEGTKALLLELSDLGYRVSAKKAQICRREVTYLGYSLRDGQRWLTEARKRTVVQIPAPKTAKQMREFLGTAGFCRLWIPGFATLAAPLYPLTKEKGEFSWAPEHQKAFDAIKKALLSAPALALPDVTKPFTLYVDERKGVARGVLTQTLGPWRRPVAYLSKKLDPVASGWPVCLKAIAAVAILVKDADKLTLGQNLTVIAPHALENIVRQPPDRWMTNARMTHYQSLLLTERVTFAPPAALNPATLLPEETDEPVTHDCHELLIEETGVRKDLTDIPLTGEVLTWFTEGSSYVVEGKRMAGAAVVDGTRTIWASSLPEGTSAQKAELMALTQALRLAEGKSINIYTDSRYAFATAHVHGAIYKQRGLLTSAGREIKNKEEILSLLEALHLPKRLAIIHCPGHQKAKDPISRGNQMADRVAKQAAQGVNLLPMIETPKAP

SEQ ID NO: 551 - DNA, 2061 bp, synthetic construct
  misc_feature 1..2061: note = Engineered reverse transcriptase variants
  source 1..2061: mol_type = other DNA
atgcatcaccatcaccatcatggtggtagcggagtgctgacccttcagctggatgatgaatatcgcttgtacagtccgctggtcaaaccagaccaaaacattcagttctggctcgaacagtttccgcaagcgtgggctgaaactggtggcatgggcctggccaaacaggttcctcctcaggtaatccagttaaaggcatctgccacgccggtgtcagttcgtcagtatccgctgtcgaaagaagcgcaggaggggattcgcccacacgtgcagcgtttgatccagcagggcattctggtaccggttcaaagcccctggaataccccgcttttaccaactggtaaaccgggtacaaacgattaccgtcctgtgcaagacctgcgcgaagtcaataaacgtgtgcaggatatccacccaaccgttccgaacccgtataatctgttgtgcgcgttaccgccgcagcgttcctggtacacggtgctggacctgaaggacgcgttcttctgtcttcgcctccatcccaccagccagccactgtttgcctttgaatggcgcgatcctgatacgggccgtactgggcaattaacatggacccgtttgccgcagggctttatgaacagtcccacgatctttgacgaggctcttcaccgcgacctcgcaaatttccgcatccaacacccacaggtaacgttactccagtatgtcgatgatcttttgttagcgggtgccaccaaacaggactgcttggaaggaacgaaagcacttctcttggaactcagtgatttaggttatcgtgtgtccgccaagaaagctcagatttgtcgccgcgaagtgacatacttaggctattcattgcgtgatggtcaacgttggcttactgaggcgcgcaagcgtaccgtcgttcaaatccccgcccctaagaccgcgaaacagatgcgtgaatttcttggcacgtgtggtttctgccgtttgtggattcctggctttgctacgttagcggcacccctctatccactcacgaaatggaaaggagaattctcttgggccccagaacatcagaaagcgtttgacgccatcaagaaagcgttattaagcgctcctgctcttgcattgcccgatgtcaccaaaccattcacgctctacgtggatgaacgcaaaggcgtagcccgcggtgtgttgacacagaccttaggaccttggcgtcgtcccgtggcctacctctcgaagaaacttgacccagttgcaagtggttggcctgtctgcttgaaagctattgccgcagttgcaatcctcgtcaaagatgccgacaaacttactttgggccagaacctgactgttattgcaccacacgcccttgaaaacatcgttcgtcagccacctgatcgctggatgaccaatgctcgcatgacgcattatcagagcctcttgcttaccgaacgcgtgacttttgctccacctgcagccttaaaccccgcaacccttttacccgaagaaacagatgagcctgtgacgcatgactgtcatgaactcttgattgaagaaactggcgtacgcaaggacctcaccgatattccattaacaggtgaggtacttacgtggtttaccgaggggtcctcttatgtcgtcgaaggcaaacgtatggctggtgccgccgttgttgatggcacccgtactatctgggcaagcagcttacccgaaggcacgagtgctcagaaagcagagttgatggccttgacccaagccttacgccttgctgaagggaaatcgatcaatatttacaccgattcacgctatgcattcgccacggcacatgtacacggtgccatctacaaacaacgtggtttgttaacttctgctggccgcgagattaagaacaaagaagaaatcctttccttacttgaagccttacacctccccaaacgtctcgctattattcattgtccagggcatcagaaagcaaaagatcctatcagccgtgggaatcaaatggcagatcgtgtcgctaaacaggcagcccaaggcgttaacttgttgcccatgattgagacccctaaagctcca

SEQ ID NO: 552 - protein, 687 aa, synthetic construct
  REGION 1..687: note = Engineered reverse transcriptase variants
MHHHHHHGGSGVLTLQLDDEYRLYSPLVKPDQNIQFWLEQFPQAWAETGGMGLAKQVPPQVIQLKASATPVSVRQYPLSKEAQEGIRPHVQRLIQQGILVPVQSPWNTPLLPTGKPGTNDYRPVQDLREVNKRVQDIHPTVPNPYNLLCALPPQRSWYTVLDLKDAFFCLRLHPTSQPLFAFEWRDPDTGRTGQLTWTRLPQGFMNSPTIFDEALHRDLANFRIQHPQVTLLQYVDDLLLAGATKQDCLEGTKALLLELSDLGYRVSAKKAQICRREVTYLGYSLRDGQRWLTEARKRTVVQIPAPKTAKQMREFLGTCGFCRLWIPGFATLAAPLYPLTKWKGEFSWAPEHQKAFDAIKKALLSAPALALPDVTKPFTLYVDERKGVARGVLTQTLGPWRRPVAYLSKKLDPVASGWPVCLKAIAAVAILVKDADKLTLGQNLTVIAPHALENIVRQPPDRWMTNARMTHYQSLLLTERVTFAPPAALNPATLLPEETDEPVTHDCHELLIEETGVRKDLTDIPLTGEVLTWFTEGSSYVVEGKRMAGAAVVDGTRTIWASSLPEGTSAQKAELMALTQALRLAEGKSINIYTDSRYAFATAHVHGAIYKQRGLLTSAGREIKNKEEILSLLEALHLPKRLAIIHCPGHQKAKDPISRGNQMADRVAKQAAQGVNLLPMIETPKAP

SEQ ID NO: 553 - DNA, 2061 bp, synthetic construct
  misc_feature 1..2061: note = Engineered reverse transcriptase variants
  source 1..2061: mol_type = other DNA
atgcatcaccatcaccatcatggtggtagcggagtgctgacccttcagctggatgatgaatatcgcttgtacagtccgctggtcaaaccagaccaaaacattcagttctggctcgaacagtttccgcaagcgtgggctgaaactggtggcatgggcctggccaaacaggttcctcctcaggtaatccagttaaaggcatctgccacgccggtgtcagttcgtcagtatccgctgtcgaaagaagcgcaggaggggattcgcccacacgtgcagcgtttgatccagcagggcattctggtaccggttcaaagcccctggaataccccgcttttaccaactggtaaaccgggtacaaacgattaccgtcctgtgcaagacctgcgcgaagtcaataaacgtgtgcaggatatccacccaaccgttccgaacccgtataatctgttgtgcgcgttaccgccgcagcgttcctggtacacggtgctggacctgaaggacgcgttcttctgtcttcgcctccatcccaccagccagccactgtttgcctttgaatggcgcgatcctgatacgggccgtactgggcaattaacatggacccgtttgccgcagggctttaagaacagtcccacgatctttgatgaggctcttcaccgcgacctcgcaaatttccgcatccaacacccacaggtaacgttactccagtatgtcgatgatcttttgttagcgggtgccaccaaacaggactgcttggaaggaacgaaagcacttctcttggaactcagtgatttaggttatcgtgtgtccgccaagaaagctcagatttgtcgccgcgaagtgacatacttaggctattcattgcgtgatggtcaacgttggcttactgaggcgcgcaagaagaccgtcgttcaaatccccgcccctaagaccgcgaaacagatgcgtgaatttcttggcacggcaggtttctgccgtttgtggattcctggctttgctacgttagcggcacccctctatccactcacgaaatggaaaggagaattctcttgggccccagaacatcagaaagcgtttgacgccatcaagaaagcgttattaagcgctcctgctcttgcattgcccgatgtcaccaaaccattcacgctctacgtggatgaacgcaaaggcgtagcccgcggtgtgttgacacagaccttaggaccttggcgtcgtcccgtggcctacctctcgaagaaacttgacccagttgcaagtggttggcctgtctgcttgaaagctattgccgcagttgcaatcctcgtcaaagatgccgacaaacttactttgggccagaacctgactgttattgcaccacacgcccttgaaaacatcgttcgtcagccacctgatcgctggatgaccaatgctcgcatgacgcattatcagagcctcttgcttaccgaacgcgtgacttttgctccacctgcagccttaaaccccgcaacccttttacccgaagaaacagatgagcctgtgacgcatgactgtcatgaactcttgattgaagaaactggcgtacgcaaggacctcaccgatattccattaacaggtgaggtacttacgtggtttaccgaggggtcctcttatgtcgtcgaaggcaaacgtatggctggtgccgccgttgttgatggcacccgtactatctgggcaagcagcttacccgaaggcacgagtgctcagaaagcagagttgatggccttgacccaagccttacgccttgctgaagggaaatcgatcaatatttacaccgattcacgctatgcattcgccacggcacatgtacacggtgccatctacaaacaacgtggtttgttaacttctgctggccgcgagattaagaacaaagaagaaatcctttccttacttgaagccttacacctccccaaacgtctcgctattattcattgtccagggcatcagaaagcaaaagatcctatcagccgtgggaatcaaatggcagatcgtgtcgctaaacaggcagcccaaggcgttaacttgttgcccatgattgagacccctaaagctcca

SEQ ID NO: 554 - protein, 687 aa, synthetic construct
  REGION 1..687: note = Engineered reverse transcriptase variants
MHHHHHHGGSGVLTLQLDDEYRLYSPLVKPDQNIQFWLEQFPQAWAETGGMGLAKQVPPQVIQLKASATPVSVRQYPLSKEAQEGIRPHVQRLIQQGILVPVQSPWNTPLLPTGKPGTNDYRPVQDLREVNKRVQDIHPTVPNPYNLLCALPPQRSWYTVLDLKDAFFCLRLHPTSQPLFAFEWRDPDTGRTGQLTWTRLPQGFKNSPTIFDEALHRDLANFRIQHPQVTLLQYVDDLLLAGATKQDCLEGTKALLLELSDLGYRVSAKKAQICRREVTYLGYSLRDGQRWLTEARKKTVVQIPAPKTAKQMREFLGTAGFCRLWIPGFATLAAPLYPLTKWKGEFSWAPEHQKAFDAIKKALLSAPALALPDVTKPFTLYVDERKGVARGVLTQTLGPWRRPVAYLSKKLDPVASGWPVCLKAIAAVAILVKDADKLTLGQNLTVIAPHALENIVRQPPDRWMTNARMTHYQSLLLTERVTFAPPAALNPATLLPEETDEPVTHDCHELLIEETGVRKDLTDIPLTGEVLTWFTEGSSYVVEGKRMAGAAVVDGTRTIWASSLPEGTSAQKAELMALTQALRLAEGKSINIYTDSRYAFATAHVHGAIYKQRGLLTSAGREIKNKEEILSLLEALHLPKRLAIIHCPGHQKAKDPISRGNQMADRVAKQAAQGVNLLPMIETPKAP

SEQ ID NO: 555 - DNA, 2061 bp, synthetic construct
  misc_feature 1..2061: note = Engineered reverse transcriptase variants
  source 1..2061: mol_type = other DNA
atgcatcaccatcaccatcatggtggtagcggagtgctgacccttcagctggatgatgaatatcgcttgtacagtccgctggtcaaaccagaccaaaacattcagttctggctcgaacagtttccgcaagcgtgggctgaaactggtggcatgggcctggccaaacaggttcctcctcaggtaatccagttaaaggcatctgccacgccggtgtcagttcgtcagtatccgctgtcgaaagaagcgcaggaggggattcgcccacacgtgcagcgtttgatccagcagggcattctggtaccggttcaaagcccctggaataccccgcttttaccaactggtaaaccgggtacaaacgattaccgtcctgtgcaagacctgcgcgaaagcaataaacgtgtgcaggatatccacccaaccgttccgaacccgtataatctgttgtgcgcgttaccgccgcagcgttcctggtacacggtgctggacctgaaggacgcgttcttctgtcttcgcctccatcccaccagccagccactgtttgcctttgaatggcgcgatcctgatacgggccgtactgggcaattaacatggacccgtttgccgcagggctttaagaacagtcccacgatctttgatgaggctcttcaccgcgacctcgcaaatttccgcatccaacacccacaggtaacgttactccagtatgtcgatgatcttttgttagcgggtgccaccaaacaggactgcttggaaggaacgaaagcacttctcttggaactcagtgatttaggttatcgtgtgtccgccaagaaagctcagatttgtcgccgcgaagtgacatacttaggctattcattgcgtgatggtcaacgttggcttactgaggcgcgcaagcgtaccgtcgttcaaatccccgcccctaagaccgcgaaacagatgcgtgaatttcttggcacggcaggtttctgccgtttgtggattcctggctttgctacgttagcggcacccctctatccactcacgaaagagaaaggagaattctcttgggccccagaacatcagaaagcgtttgacgccatcaagaaagcgttattaagcgctcctgctcttgcattgcccgatgtcaccaaaccattcacgctctacgtggatgaacgcaaaggcgtagcccgcggtgtgttgacacagaccttaggaccttggcgtcgtcccgtggcctacctctcgaagaaacttgacccagttgcaagtggttggcctgtctgcttgaaagctattgccgcagttgcaatcctcgtcaaagatgccgacaaacttactttgggccagaacctgactgttattgcaccacacgcccttgaaaacatcgttcgtcagccacctgatcgctggatgaccaatgctcgcatgacgcattatcagagcctcttgcttaccgaacgcgtgacttttgctccacctgcagccttaaaccccgcaacccttttacccgaagaaacagatgagcctgtgacgcatgactgtcatgaactcttgattgaagaaactggcgtacgcaaggacctcaccgatattccattaacaggtgaggtacttacgtggtttaccgaggggtcctcttatgtcgtcgaaggcaaacgtatggctggtgccgccgttgttgatggcacccgtactatctgggcaagcagcttacccgaaggcacgagtgctcagaaagcagagttgatggccttgacccaagccttacgccttgctgaagggaaatcgatcaatatttacaccgattcacgctatgcattcgccacggcacatgtacacggtgccatctacaaacaacgtggtttgttaacttctgctggccgcgagattaagaacaaagaagaaatcctttccttacttgaagccttacacctccccaaacgtctcgctattattcattgtccagggcatcagaaagcaaaagatcctatcagccgtgggaatcaaatggcagatcgtgtcgctaaacaggcagcccaaggcgttaacttgttgcccatgattgagacccctaaagctcca

SEQ ID NO: 556 - protein, 687 aa, synthetic construct
  REGION 1..687: note = Engineered reverse transcriptase variants
MHHHHHHGGSGVLTLQLDDEYRLYSPLVKPDQNIQFWLEQFPQAWAETGGMGLAKQVPPQVIQLKASATPVSVRQYPLSKEAQEGIRPHVQRLIQQGILVPVQSPWNTPLLPTGKPGTNDYRPVQDLRESNKRVQDIHPTVPNPYNLLCALPPQRSWYTVLDLKDAFFCLRLHPTSQPLFAFEWRDPDTGRTGQLTWTRLPQGFKNSPTIFDEALHRDLANFRIQHPQVTLLQYVDDLLLAGATKQDCLEGTKALLLELSDLGYRVSAKKAQICRREVTYLGYSLRDGQRWLTEARKRTVVQIPAPKTAKQMREFLGTAGFCRLWIPGFATLAAPLYPLTKEKGEFSWAPEHQKAFDAIKKALLSAPALALPDVTKPFTLYVDERKGVARGVLTQTLGPWRRPVAYLSKKLDPVASGWPVCLKAIAAVAILVKDADKLTLGQNLTVIAPHALENIVRQPPDRWMTNARMTHYQSLLLTERVTFAPPAALNPATLLPEETDEPVTHDCHELLIEETGVRKDLTDIPLTGEVLTWFTEGSSYVVEGKRMAGAAVVDGTRTIWASSLPEGTSAQKAELMALTQALRLAEGKSINIYTDSRYAFATAHVHGAIYKQRGLLTSAGREIKNKEEILSLLEALHLPKRLAIIHCPGHQKAKDPISRGNQMADRVAKQAAQGVNLLPMIETPKAP

SEQ ID NO: 557 - DNA, 2061 bp, synthetic construct
  misc_feature 1..2061: note = Engineered reverse transcriptase variants
  source 1..2061: mol_type = other DNA
atgcatcaccatcaccatcatggtggtagcggagtgctgacccttcagctggatgatgaatatcgcttgtacagtccgctggtcaaaccagaccaaaacattcagttctggctcgaacagtttccgcaagcgtgggctgaaactggtggcatgggcctggccaaacaggttcctcctcaggtaatccagttaaaggcatctgccacgccggtgtcagttcgtcagtatccgctgtcgaaagaagcgcaggaggggattcgcccacacgtgcagcgtttgatccagcagggcattctggtaccggttcaaagcccctggaataccccgcttttaccaactcgtaaaccgggtacaaacgattaccgtcctgtgcaagacctgcgcgaagtcaataaacgtgtgcaggatatccacccaaccgttccgaacccgtataatctgttgtgcgcgttaccgccgcagcgttcctggtacacggtgctggacctgaaggacgcgttcttctgtcttcgcctccatcccaccagccagccactgtttgcctttgaatggcgcgatcctgatacgggccgtactgggcaattaacatggacccgtttgccgcagggctttaagaacagtcccacgatctttgatgaggctcttcaccgcgacctcgcaaatttccgcatccaacacccacaggtaacgttactccagtatgtcgatgatcttttgttagcgggtgccaccaaacaggactgcttggaaggaacgaaagcacttctcttggaactcagtgatttaggttatcgtgtgtccgccaagaaagctcagatttgtcgccgcgaagtgacatacttaggctattcattgcgtgatggtcaacgttggcttactgaggcgcgcaagaagaccgtcgttcaaatccccgcccctaagaccgcgaaacagatgcgtgaatttcttggcacggcaggtttctgccgtttgtggattcctggctttgctacgttagcggcacccctctatccactcacgaaagagaaaggagaattctcttgggccccagaacatcagaaagcgtttgacgccatcaagaaagcgttattaagcgctcctgctcttgcattgcccgatgtcaccaaaccattcacgctctacgtggatgaacgcaaaggcgtagcccgcggtgtgttgacacagaccttaggaccttggcgtcgtcccgtggcctacctctcgaagaaacttgacccagttgcaagtggttggcctgtctgcttgaaagctattgccgcagttgcaatcctcgtcaaagatgccgacaaacttactttgggccagaacctgactgttattgcaccacacgcccttgaaaacatcgttcgtcagccacctgatcgctggatgaccaatgctcgcatgacgcattatcagagcctcttgcttaccgaacgcgtgacttttgctccacctgcagccttaaaccccgcaacccttttacccgaagaaacagatgagcctgtgacgcatgactgtcatgaactcttgattgaagaaactggcgtacgcaaggacctcaccgatattccattaacaggtgaggtacttacgtggtttaccgaggggtcctcttatgtcgtcgaaggcaaacgtatggctggtgccgccgttgttgatggcacccgtactatctgggcaagcagcttacccgaaggcacgagtgctcagaaagcagagttgatggccttgacccaagccttacgccttgctgaagggaaatcgatcaatatttacaccgattcacgctatgcattcgccacggcacatgtacacggtgccatctacaaacaacgtggtttgttaacttctgctggccgcgagattaagaacaaagaagaaatcctttccttacttgaagccttacacctccccaaacgtctcgctattattcattgtccagggcatcagaaagcaaaagatcctatcagccgtgggaatcaaatggcagatcgtgtcgctaaacaggcagcccaaggcgttaacttgttgcccatgattgagacccctaaagctcca

SEQ ID NO: 558 - protein, 687 aa, synthetic construct
  REGION 1..687: note = Engineered reverse transcriptase variants
MHHHHHHGGSGVLTLQLDDEYRLYSPLVKPDQNIQFWLEQFPQAWAETGGMGLAKQVPPQVIQLKASATPVSVRQYPLSKEAQEGIRPHVQRLIQQGILVPVQSPWNTPLLPTRKPGTNDYRPVQDLREVNKRVQDIHPTVPNPYNLLCALPPQRSWYTVLDLKDAFFCLRLHPTSQPLFAFEWRDPDTGRTGQLTWTRLPQGFKNSPTIFDEALHRDLANFRIQHPQVTLLQYVDDLLLAGATKQDCLEGTKALLLELSDLGYRVSAKKAQICRREVTYLGYSLRDGQRWLTEARKKTVVQIPAPKTAKQMREFLGTAGFCRLWIPGFATLAAPLYPLTKEKGEFSWAPEHQKAFDAIKKALLSAPALALPDVTKPFTLYVDERKGVARGVLTQTLGPWRRPVAYLSKKLDPVASGWPVCLKAIAAVAILVKDADKLTLGQNLTVIAPHALENIVRQPPDRWMTNARMTHYQSLLLTERVTFAPPAALNPATLLPEETDEPVTHDCHELLIEETGVRKDLTDIPLTGEVLTWFTEGSSYVVEGKRMAGAAVVDGTRTIWASSLPEGTSAQKAELMALTQALRLAEGKSINIYTDSRYAFATAHVHGAIYKQRGLLTSAGREIKNKEEILSLLEALHLPKRLAIIHCPGHQKAKDPISRGNQMADRVAKQAAQGVNLLPMIETPKAP

SEQ ID NO: 559 - DNA, 2061 bp, synthetic construct
  misc_feature 1..2061: note = Engineered reverse transcriptase variants
  source 1..2061: mol_type = other DNA
atgcatcaccatcaccatcatggtggtagcggagtgctgacccttcagctggatgatgaatatcgcttgtacagtccgctggtcaaaccagaccaaaacattcagttctggctcgaacagtttccgcaagcgtgggctgaaactggtggcatgggcctggccaaacaggttcctcctcaggtaatccagttaaaggcatctgccacgccggtgtcagttcgtcagtatccgctgtcgaaagaagcgcaggaggggattcgcccacacgtgcagcgtttgatccagcagggcattctggtaccggttcaaagcccctggaataccccgcttttaccaactcgtaaaccgggtacaaacgattaccgtcctgtgcaagacctgcgcgaagtcaataaacgtgtgcaggatatccacccaaccgttccgaacccgtataatctgttgtgcgcgttaccgccgcagcgttcctggtacacggtgctggacctgaaggacgcgttcttctgtcttcgcctccatcccaccagccagccactgtttgcctttgaatggcgcgatcctgatacgggccgtactgggcaattaacatggacccgtttgccgcagggctttaagaacagtcccacgatctttgacgaggctcttcaccgcgacctcgcaaatttccgcatccaacacccacaggtaacgttactccagtatgtcgatgatcttttgttagcgggtgccaccaaacaggactgcttggaaggaacgaaagcacttctcttggaactcagtgatttaggttatcgtgtgtccgccaagaaagctcagatttgtcgccgcgaagtgacatacttaggctattcattgcgtgatggtcaacgttggcttactgaggcgcgcaagaagaccgtcgttcaaatccccgcccctaagactgaaaaacagatgcgtgaatttcttggcacggcaggtttctgccgtttgtggattcctggctttgctacgttagcggcacccctctatccactcacgaaagagaaaggagaattctcttgggccccagaacatcagaaagcgtttgacgccatcaagaaagcgttattaagcgctcctgctcttgcattgcccgatgtcaccaaaccattcacgctctacgtggatgaacgcaaaggcgtagcccgcggtgtgttgacacagaccttaggaccttggcgtcgtcccgtggcctacctctcgaagaaacttgacccagttgcaagtggttggcctgtctgcttgaaagctattgccgcagttgcaatcctcgtcaaagatgccgacaaacttactttgggccagaacattactgttattgcaccacacgcccttgaaaacatcgttcgtcagccacctgatcgctggatgaccaatgctcgcatgacgcattatcagagcctcttgcttaccgaacgcgtgacttttgctccacctgcagccttaaaccccgcaacccttttacccgaagaaacagatgagcctgtgacgcatgactgtcatgaactcttgattgaagaaactggcgtacgcaaggacctcaccgatattccattaacaggtgaggtacttacgtggtttaccgaggggtcctcttatgtcgtcgaaggcaaacgtatggctggtgccgccgttgttgatggcacccgtactatctgggcaagcagcttacccgaaggcacgagtgctcagaaagcagagttgatggccttgacccaagccttacgccttgctgaagggaaatcgatcaatatttacaccgattcacgctatgcattcgccacggcacatgtacacggtgccatctacaaacaacgtggtttgttaacttctgctggccgcgagattaagaacaaagaagaaatcctttccttacttgaagccttacacctccccaaacgtctcgctattattcattgtccagggcatcagaaagcaaaagatcctatcagccgtgggaatcaaatggcagatcgtgtcgctaaacaggcagcccaaggcgttaacttgttgcccatgattgagacccctaaagctcca

SEQ ID NO: 560 - protein, 687 aa, synthetic construct
  REGION 1..687: note = Engineered reverse transcriptase variants
MHHHHHHGGSGVLTLQLDDEYRLYSPLVKPDQNIQFWLEQFPQAWAETGGMGLAKQVPPQVIQLKASATPVSVRQYPLSKEAQEGIRPHVQRLIQQGILVPVQSPWNTPLLPTRKPGTNDYRPVQDLREVNKRVQDIHPTVPNPYNLLCALPPQRSWYTVLDLKDAFFCLRLHPTSQPLFAFEWRDPDTGRTGQLTWTRLPQGFKNSPTIFDEALHRDLANFRIQHPQVTLLQYVDDLLLAGATKQDCLEGTKALLLELSDLGYRVSAKKAQICRREVTYLGYSLRDGQRWLTEARKKTVVQIPAPKTEKQMREFLGTAGFCRLWIPGFATLAAPLYPLTKEKGEFSWAPEHQKAFDAIKKALLSAPALALPDVTKPFTLYVDERKGVARGVLTQTLGPWRRPVAYLSKKLDPVASGWPVCLKAIAAVAILVKDADKLTLGQNITVIAPHALENIVRQPPDRWMTNARMTHYQSLLLTERVTFAPPAALNPATLLPEETDEPVTHDCHELLIEETGVRKDLTDIPLTGEVLTWFTEGSSYVVEGKRMAGAAVVDGTRTIWASSLPEGTSAQKAELMALTQALRLAEGKSINIYTDSRYAFATAHVHGAIYKQRGLLTSAGREIKNKEEILSLLEALHLPKRLAIIHCPGHQKAKDPISRGNQMADRVAKQAAQGVNLLPMIETPKAP

SEQ ID NO: 561 - DNA, 2061 bp, synthetic construct
  misc_feature 1..2061: note = Engineered reverse transcriptase variants
  source 1..2061: mol_type = other DNA
atgcatcaccatcaccatcatggtggtagcggagtgctgacccttcagctggatgatgaatatcgcttgtacagtccgctggtcaaaccagaccaaaacattcagttctggctcgaacagtttccgcaagcgtgggctgaaactggtggcatgggcctggccaaacaggttcctcctcaggtaatccagttaaaggcatctgccacgccggtgtcagttcgtcagtatccgctgtcgaaagaagcgcaggaggggattcgcccacacgtgcagcgtttgatccagcagggcattctggtaccggttcaaagcccctggaataccccgcttttaccagtccgcaaaccgggtacaaacgattaccgtcctgtgcaagacctgcgcgaaagcaataaacgtgtgcaggatatccacccaaccgttccgaacccgtataatctgttgtgcgcgttaccgccgcagcgttcctggtacacggtgctggacctgaaggacgcgttcttctgtcttcgcctccatcccaccagccagccactgtttgcctttgaatggcgcgatcctgatacgggccgtactgggcaattaacatggacccgtttgccgcagggctttatgaacagtcccacgatctttgatgaggctcttcaccgcgacctcgcaaatttccgcatccaacacccacaggtaacgttactccagtatgtcgatgatcttttgttagcgggtgccaccaaacaggactgcttggaaggaacgaaagcacttctcttggaactcagtgatttaggttatcgtgtgtccgccaagaaagctcagatttgtcgccgcgaagtgacatacttaggctattcattgcgtgatggtcaacgttggcttactgaggcgcgcaagcgtaccgtcgttcaaatccccgcccctaagaccgcgaaacagatgcgtgaatttcttggcacggcaggtttctgccgtttgtggattcctggctttgctacgttagtggcacccctctatccactcacgaaagagaaaggagaattctcttgggccccagaacatcagaaagcgtttgacgccatcaagaaagcgttattaagcgctcctgctcttgcattgcccgatgtcaccaaaccattcacgctctacgtggatgaacgcaaaggcgtagcccgcggtgtgttgacacagaccttaggaccttggcgtcgtcccgtggcctacctctcgaagaaacttgacccagttgcaagtggttggcctgtctgcttgaaagctattgccgcagttgcaatcctcgtcaaagatgccgacaaacttactttgggccagaacattactgttattgcaccacacgcccttgaaaacatcgttcgtcagccacctgatcgctggatgaccaatgctcgcatgacgcattatcagagcctcttgcttaccgaacgcgtgacttttgctccacctgcagccttaaaccccgcaacccttttacccgaagaaacagatgagcctgtgacgcatgactgtcatgaactcttgattgaagaaactggcgtacgcaaggacctcaccgatattccattaacaggtgaggtacttacgtggtttaccgaggggtcctcttatgtcgtcgaaggcaaacgtatggctggtgccgccgttgttgatggcacccgtactatctgggcaagcagcttacccgaaggcacgagtgctcagaaagcagagttgatggccttgacccaagccttacgccttgctgaagggaaatcgatcaatatttacaccgattcacgctatgcattcgccacggcacatgtacacggtgccatctacaaacaacgtggtttgttaacttctgctggccgcgagattaagaacaaagaagaaatcctttccttacttgaagccttacacctccccaaacgtctcgctattattcattgtccagggcatcagaaagcaaaagatcctatcagccgtgggaatcaaatggcagatcgtgtcgctaaacaggcagcccaaggcgttaacttgttgcccatgattgagacccctaaagctcca

SEQ ID NO: 562 - protein, 687 aa, synthetic construct
  REGION 1..687: note = Engineered reverse transcriptase variants
MHHHHHHGGSGVLTLQLDDEYRLYSPLVKPDQNIQFWLEQFPQAWAETGGMGLAKQVPPQVIQLKASATPVSVRQYPLSKEAQEGIRPHVQRLIQQGILVPVQSPWNTPLLPVRKPGTNDYRPVQDLRESNKRVQDIHPTVPNPYNLLCALPPQRSWYTVLDLKDAFFCLRLHPTSQPLFAFEWRDPDTGRTGQLTWTRLPQGFMNSPTIFDEALHRDLANFRIQHPQVTLLQYVDDLLLAGATKQDCLEGTKALLLELSDLGYRVSAKKAQICRREVTYLGYSLRDGQRWLTEARKRTVVQIPAPKTAKQMREFLGTAGFCRLWIPGFATLVAPLYPLTKEKGEFSWAPEHQKAFDAIKKALLSAPALALPDVTKPFTLYVDERKGVARGVLTQTLGPWRRPVAYLSKKLDPVASGWPVCLKAIAAVAILVKDADKLTLGQNITVIAPHALENIVRQPPDRWMTNARMTHYQSLLLTERVTFAPPAALNPATLLPEETDEPVTHDCHELLIEETGVRKDLTDIPLTGEVLTWFTEGSSYVVEGKRMAGAAVVDGTRTIWASSLPEGTSAQKAELMALTQALRLAEGKSINIYTDSRYAFATAHVHGAIYKQRGLLTSAGREIKNKEEILSLLEALHLPKRLAIIHCPGHQKAKDPISRGNQMADRVAKQAAQGVNLLPMIETPKAP

SEQ ID NO: 563 - DNA, 2061 bp, synthetic construct
  misc_feature 1..2061: note = Engineered reverse transcriptase variants
  source 1..2061: mol_type = other DNA
atgcatcaccatcaccatcatggtggtagcggagtgctgacccttcagctggatgatgaatatcgcttgtacagtccgctggtcaaaccagaccaaaacattcagttctggctcgaacagtttccgcaagcgtgggctgaaactggtggcatgggcctggccaaacaggttcctcctcaggtaatccagttaaaggcatctgccacgccggtgtcagttcgtcagtatccgctgtcgaaagaagcgcaagaggggattcgcccacacgtgcagcgtttgatccagcagggcattctggtaccggttcaaagcccctggaataccccgcttttaccagtccgcaaaccgggtacaaacgattaccgtcctgtgcaagacctgcgcgaagtcaataaacgtccacaggatatccacccaaccgttccgaacccgtataatctgttgtgcgcgttaccgccgcagcgttcctggtacacggtgctggacctgaaggacgcgttcttctgtcttcgcctccatcccaccagccagccactgtttgcctttgaatggcgcgatcctgatacgggccgtactgggcaattaacgtggacccgtttgccgcagggctttaagaacagtcccacgatctttgatgaggctcttcaccgcgacctcgcaaatttccgcatccaacacccacaggtaacgttactccagtatgtcgatgatcttttgttagcgggtgccaccaaacaggactgcttggaaggaacgaaagcacttctcttggaactcagtgatttaggttatcgtgtgtccgccaagaaagctcagatttgtcgccgcgaagtgacatacttaggctattcattgcgtgatggtcaacgttggcttactgaggcgcgcaagcgtaccgtcgttcaaatccccgcccctaagaccgcgaaacagatgcgtgaatttcttggcacggcaggtttctgccgtttgtggattcctggcttcgctacgttagcggcacccctctatccactcacgaaagagaaaggagaattctcttgggccccagaacatcagaaagcgtttgacgccatcaagaaagcgttattaagcgctcctgctcttgcattgcccgatgtcaccaaaccattcacgctctacgtggatgaacgcaaaggcgtagcccgcggtgtgttgacacagaccttaggaccttggcgtcgtcccgtggcctacctctcgaagaaacttgacccagttgcaagtggttggcctgtctgcttgaaagctattgccgcagttgcaatcctcgtcaaagatgccgacaaacttactttgggccagaacctgactgttattgcaccacacgcccttgaaaacatcgttcgtcagccacctgatcgctggatgaccaatgctcgcatgacgcattatcagagcctcttgcttaccgaacgcgtgacttttgctccacctgcagccttaaaccccgcaacccttttacccgaagaaacagatgagcctgtgacgcatgactgtcatgaactcttgattgaagaaactggcgtacgcaaggacctcaccgatattccattaacaggtgaggtacttacgtggtttaccgaggggtcctcttatgtcgtcgaaggcaaacgtatggctggtgccgccgttgttgatggcacccgtactatctgggcaagcagcttacccgaaggcacgagtgctcagaaagcagagttgatggccttgacccaagccttacgccttgctgaagggaaatcgatcaatatttacaccgattcacgctatgcattcgccacggcacatgtacacggtgccatctacaaacaacgtggtttgttaacttctgctggccgcgagattaagaacaaagaagaaatcctttccttacttgaagccttacacctccccaaacgtctcgctattattcattgtccagggcatcagaaagcaaaagatcctatcagccgtgggaatcaaatggcagatcgtgtcgctaaacaggcagcccaaggcgttaacttgttgcccatgattgagacccctaaagctcca

SEQ ID NO: 564 - protein, 687 aa, synthetic construct
  REGION 1..687: note = Engineered reverse transcriptase variants
MHHHHHHGGSGVLTLQLDDEYRLYSPLVKPDQNIQFWLEQFPQAWAETGGMGLAKQVPPQVIQLKASATPVSVRQYPLSKEAQEGIRPHVQRLIQQGILVPVQSPWNTPLLPVRKPGTNDYRPVQDLREVNKRPQDIHPTVPNPYNLLCALPPQRSWYTVLDLKDAFFCLRLHPTSQPLFAFEWRDPDTGRTGQLTWTRLPQGFKNSPTIFDEALHRDLANFRIQHPQVTLLQYVDDLLLAGATKQDCLEGTKALLLELSDLGYRVSAKKAQICRREVTYLGYSLRDGQRWLTEARKRTVVQIPAPKTAKQMREFLGTAGFCRLWIPGFATLAAPLYPLTKEKGEFSWAPEHQKAFDAIKKALLSAPALALPDVTKPFTLYVDERKGVARGVLTQTLGPWRRPVAYLSKKLDPVASGWPVCLKAIAAVAILVKDADKLTLGQNLTVIAPHALENIVRQPPDRWMTNARMTHYQSLLLTERVTFAPPAALNPATLLPEETDEPVTHDCHELLIEETGVRKDLTDIPLTGEVLTWFTEGSSYVVEGKRMAGAAVVDGTRTIWASSLPEGTSAQKAELMALTQALRLAEGKSINIYTDSRYAFATAHVHGAIYKQRGLLTSAGREIKNKEEILSLLEALHLPKRLAIIHCPGHQKAKDPISRGNQMADRVAKQAAQGVNLLPMIETPKAP

SEQ ID NO: 565 - DNA, 2061 bp, synthetic construct
  misc_feature 1..2061: note = Engineered reverse transcriptase variants
  source 1..2061: mol_type = other DNA
atgcatcaccatcaccatcatggtggtagcggagtgctgacccttcagctggatgatgaatatcgcttgtacagtccgctggtcaaaccagaccaaaacattcagttctggctcgaacagtttccgcaagcgtgggctgaaactggtggcatgggcctggccaaacaggttcctcctcaggtaatccagttaaaggcatctgccacgccggtgagtgttcgtcagtatccgctgtcgaaagaagcgcaagaggggattcgcccacacgtgcagcgtttgatccagcagggcattctggtaccggttcaaagcccctggaataccccgcttttaccagtccgcaaaccgggtacaaacgattaccgtcctgtgcaagacctgcgcgaagtcaataaacgtccacaggatatccacccaaccgttccgaacccgtataatctgttgtgcgcgttaccgccgcagcgttcctggtacacggtgctggacctgaaggacgcgttcttctgtcttcgcctccatcccaccagccagccactgtttgcctttgaatggcgcgatcctgatacgggccgtactgggcaattaacgtggacccgtttgccgcagggctttaagaacagtcccacgatctttgatgaggctcttcaccgcgacctcgcaaatttccgcatccaacacccacaggtaacgttactccagtatgtcgatgatcttttgttagcgggtgccaccaaacaggactgcttggaaggaacgaaagcacttctcttggaactcagtgatttaggttatcgtgtgtccgccaagaaagctcagatttgtcgccgcgaagtgacatacttaggctattcattgcgtgatggtcaacgttggcttactcaggcgcgcaagcgtaccgtcgttcaaatccccgcccctaagaccgcgaaacagatgcgtgaatttcttggcacggcaggtttctgccgtttgtggattcctggcttcgctacgttagcggcacccctctatccactcacgaaagagaaaggagaattctcttgggccccagaacatcagaaagcgtttgacgccatcaagaaagcgttattaagcgctcctgctcttgcattgcccgatgtcaccaaaccattcacgctctacgtggatgaacgcaaaggcgtagcccgcggtgtgttgacacagaccttaggaccttggcgtcgtcccgtggcctacctctcgaagaaacttgacccagttgcaagtggttggcctgtctgcttgaaagctattgccgcagttgcaatcctcgtcaaagatgccgacaaacttactttgggccagaacattactgttattgcaccacacgcccttgaaaacatcgttcgtcagccacctgatcgctggatgaccaatgctcgcatgacgcattatcagagcctcttgcttaccgaacgcgtgacttttgctccacctgcagccttaaaccccgcaacccttttacccgaagaaacagatgagcctgtgacgcatgactgtcatcagctcttgattgaggaaactggcgtacgcaaggacctcaccgatattccattaacaggtgaggtacttacgtggtttaccgaggggtcctcttatgtcgtcgaaggcaaacgtatggctggtgccgccgttgttgatggcacccgtactatctgggcaagcagcttacccgaaggcacgagtgctcagaaagcagaattgatggccttgacccaagccttacgccttgctgaagggaaatcgatcaatatttacaccgattcacgctatgcattcgccacggcacatgtacacggtgccatctacaaacaacgtggtttgttaacttctgctggccgcgagattaagaacaaagaagaaatcctttccttacttgaagccttacacctccccaaacgtctcgctattattcattgtccagggcatcagaaagcaaaagatcctatcagccgtgggaatcaaatggcagatcgtgtcgctaaacaggcagcccaaggcgttaacttgttgcccatgattgagacccctaaagctcca

SEQ ID NO: 566 - protein, 687 aa, synthetic construct
  REGION 1..687: note = Engineered reverse transcriptase variants
MHHHHHHGGSGVLTLQLDDEYRLYSPLVKPDQNIQFWLEQFPQAWAETGGMGLAKQVPPQVIQLKASATPVSVRQYPLSKEAQEGIRPHVQRLIQQGILVPVQSPWNTPLLPVRKPGTNDYRPVQDLREVNKRPQDIHPTVPNPYNLLCALPPQRSWYTVLDLKDAFFCLRLHPTSQPLFAFEWRDPDTGRTGQLTWTRLPQGFKNSPTIFDEALHRDLANFRIQHPQVTLLQYVDDLLLAGATKQDCLEGTKALLLELSDLGYRVSAKKAQICRREVTYLGYSLRDGQRWLTQARKRTVVQIPAPKTAKQMREFLGTAGFCRLWIPGFATLAAPLYPLTKEKGEFSWAPEHQKAFDAIKKALLSAPALALPDVTKPFTLYVDERKGVARGVLTQTLGPWRRPVAYLSKKLDPVASGWPVCLKAIAAVAILVKDADKLTLGQNITVIAPHALENIVRQPPDRWMTNARMTHYQSLLLTERVTFAPPAALNPATLLPEETDEPVTHDCHQLLIEETGVRKDLTDIPLTGEVLTWFTEGSSYVVEGKRMAGAAVVDGTRTIWASSLPEGTSAQKAELMALTQALRLAEGKSINIYTDSRYAFATAHVHGAIYKQRGLLTSAGREIKNKEEILSLLEALHLPKRLAIIHCPGHQKAKDPISRGNQMADRVAKQAAQGVNLLPMIETPKAP

SEQ ID NO: 567 - protein, 850 aa, synthetic construct
  REGION 1..850: note = Engineered Thermal DNA Polymerase
MHHHHHHGGSGMNGVQQPGLFQSKPERIVLVDGHHLAFRAYYALKDAGLSTSSGEPVHAVYGFARTLLKLLREDGDCVIVVFDAPGPSFRHEEFAGYKAQRVAPPEDFKPQVEKIKQLVDLLGLVRLEVPGYEADDVLATLARRAEREGYEVVILTGDRDTYQLLTDRVVVVTPDERRITPDYLRQKYGVGPEQWVDYRALTGDPSDNIPGVRGVGAKTAAKLLARWGSLDRIYEHLDEVTPPGVRKKLEEGREAAFFSRELARMRADVPLDVDLTGCHRNEVDREGLRRFLLDLEFGTLLRELGLIQAPEAQEAAWPPPERAWLGYVFDRPEPMWAELGQLAAAWDERVAEGPARALELERFPQLDAVQAKDLTVWALREGVRARPGDDPLLLAYLYDPSNNQPASTVRRYGVGDWTDRARDRALAARWLWREMSDRLEGEERLWWLYREVERPLQGVLAAMERRGVKLDVDYLLALSQELAAELERLEAEIHRLAGHPFNLNSRDQLETVLYDELGLAGGRRTAKTGKRSTSASVLETLRGAHPIVEKILQYRELAKLKGTYLDPLPKLVHPRTGRLHTRFHQTGTATGRLSSSDPNLQNIPIRTEIGRRIRKGFVAGEGYLLVVADYSQIELRVLAHLSGDENLIRIFQEGRDIHTQTAAWMFGVEDVEVDPFRRRAAKTINFGVLYGMSAHRLSRELGIDYGEAQAFIDRYFDSYPGVRAFMERVLEEARERGYVETLFGRRRYVPELLSKARNVREAAERVAFNMPVQGTAADLIKLAMVKLAPRLEPLGAALLLQVHDELVVEAPEERAAETARVVKATMEEAWRLDVPLAVEVGVGRDWLEAK

SEQ ID NO: 568 - protein, 850 aa, synthetic construct
  REGION 1..850: note = Engineered Thermal DNA Polymerase
MHHHHHHGGSGMNGVQQPGLFQSKPERIVLVDGHHLAFRAYYALKDAGLSTSSGEPVHAVYGFARTLLKLLREDGDCVIVVFDAPGPSFRHEEFAGYKAQRSAPPEDFKPQVEKIKQLVDLLGLVRLEVPGYEADDVLATLARRAEREGYEVVILTGDRDTYQLLTDRVVVVTPDERRITPDYLRQKYGVGPEQWVDYRALTGDPSDNIPGVRGVGAKTAAKLLARWGSLDRIYEHLDEVTPPGVRKKLEEGREAAFFSRELARMRADVPLDVDLTGCHRNEVDREGLRRFLLDLEFGTLLRELGLIQAPEAQEAAWPPPERAWLGYVFDRPEPMWAELGQLAAAWDERVAEGPARALELERFPQLDAVQAKDLTVWALREGVRARPGDDPLLLAYLYDPSNNQPASTVRRYGVGDWTDRARDRALAARWLWREMSDRLEGEERLWWLYREVERPLQGVLAAMERRGVKLDVDYLLALSQELAAELERLEAEIHRLAGHPFNLNSRDQLETVLYDELGLAGGRRTAKTGKRSTSASVLETLRGAHPIVEKILQYRELAKLKGTYLDPLPKLVHPRTGRLHTRFHQTGTATGRLSSSDPNLQNIPIRTEIGRRIRKGFVAGEGYLLVVADYSQIELRVLAHLSGDENLIRIFQEGRDIHTQTAAWMFGVEDVEVDPFRRRAAKTINFGVLYGMSAHRLSRELGIDYGEAQAFIDRYFDSYPGVRAFMERVLEEARERGYVETLFGRRRYVPELLSKARNVREAAERVAFNMPVQGTAADLIKLAMVKLAPRLEPLGAALLLQVHDELVVEAPEERAAETARVVKATMEEAWRLDVPLAVEVGVGRDWLEAK

SEQ ID NO: 569 - protein, 850 aa, synthetic construct
  REGION 1..850: note = Engineered Thermal DNA Polymerase
MHHHHHHGGSGMNGVQQPGLFQSKPERIVLVDGHHLAFRAYYALKDAGLSTSSGEPVHAVYGFARTLLKLLREDGDCVIVVFDAEGPSFRHEEFAGYKAQRSAPPEDFKPQVEKIKQLVDLLGLVRLEVPGYEADDVLATLARRAEREGYEVVILTGDRDTYQLLTDRVVVVTPDERRITPDYLRQKYGVGPEQWVDYRALTGDPSDNIPGVRGVGAKTAAKLLARWGSLDRIYEHLDEVTPPGVRKKLEEGREAAFFSRELARMRADVPLDVDLTGCHRNEVDREGLRRFLLDLEFGTLLRELGLIQAPEAQEAAWPPPERAWLGYVFDRPEPMWAELGQLAAAWDERVAEGPARALELERFPQLDAVQAKDLTVWALREGVRARPGDDPLLLAYLYDPSNNQPASTVRRYGVGDWTDRARDRALAARWLWREMSDRLEGEERLWWLYREVERPLQGVLAAMERRGVKLDVDYLLALSQELAAELERLEAEIHRLAGHPFNLNSRDQLETVLYDELGLAGGRRTAKTGKRSTSASVLETLRGAHPIVEKILQYRELAKLKGTYLDPLPKLVHPRTGRLHTRFHQTGTATGRLSSSDPNLQNIPIRTEIGRRIRKGFVAGEGYLLVVADYSQIELRVLAHLSGDENLIRIFQEGRDIHTQTAAWMFGVEDVEVDPFRRRAAKTINFGVLYGMSAHRLSRELGIDYGEAQAFIDRYFDSYPGVRAFMERVLEEARERGYVETLFGRRRYVSELLSKARNVREAAERVAFNMPVQGTAADLIKLAMVKLAPRLEPLGAALLLQVHDELVVEAPEERAAETARVVKATMEEAWRLDVPLAVEVGVGRDWLEAK
